(19) United States
(12) Patent Application Publication
(10) Pub. No.: US 2024/0218057 A1
(43) Pub. Date: Jul. 4, 2024

(54) NEUTRALIZING ANTI- SARS-COV-2 ANTIBODIES AND METHODS OF USE THEREOF

(71) Applicant: The Rockefeller University, New York, NY (US)

(72) Inventor: Michel C. Nussenzweig, New York, NY (US)

(21) Appl. No.: 18/558,066

(22) PCT Filed: May 5, 2022
(86) PCT No.: PCT/US22/27774

§ 371 Date: Oct. 30, 2023

Related U.S. Application Data
(60) Provisional application No. 63/184,882, filed on May 6, 2021.

(51) Int. Cl. C07K 16/10; A61K 47/68

(52) U.S. Cl. CPC C07K 16/1003; A61K 47/6841; C07K 2317/24; C07K 2317/31; C07K 2317/35

(57) ABSTRACT

This disclosure provides novel neutralizing anti-SARS-COV-2 antibodies or antigen-binding fragments thereof. The disclosed anti-SARS-COV-2 antibodies constitute a novel therapeutic strategy in protection from SARS-COV-2 infections.

### CROSS-REFERENCE TO RELATED APPLICATIONS

[0001] This application is a National Stage Application under 35 U.S.C. § 371 of International Application No. PCT/US2022/027774, filed on May 5, 2022, which published in the English language on Nov. 10, 2022 under International Publication No. WO2022/235867 A2, which claims the benefit of priority under 35 U.S.C. § 119(e) to U.S. Provisional Patent Application No. 63/184,882, filed May 6, 2021. The foregoing applications are incorporated by reference in their entireties.

### STATEMENT REGARDING FEDERALLY FUNDED RESEARCH

[0002] This invention was made with government support under grant nos. P01-AI138398-S1, 2U19AI111825, R37-AI64003 and R01AI78788 awarded by the National Institutes of Health. The government has certain rights in the invention.

### REFERENCE TO SEQUENCE LISTING SUBMITTED ELECTRONICALLY

[0003] This application contains a sequence listing, which is submitted electronically via EFS-Web as an ASCII formatted sequence listing with a file name “Seq Listing 070413_20773” and a creation date of Oct. 12, 2023, and having a size of 8,240 kb. The sequence listing submitted via EFS-Web is part of the specification and is herein incorporated by reference in its entirety.

### FIELD OF THE INVENTION

[0004] The present disclosure relates to antibodies directed to epitopes of SARS-COV-2 Coronavirus 2 (“SARS-COV-2”). The present disclosure further relates to the preparation and use of broadly neutralizing antibodies directed to the SARS-COV-2 spike (S) glycoproteins for the prevention and treatment of SARS-COV-2 infection.

### BACKGROUND OF THE INVENTION

[0005] SARS-COV-2 is the virus that causes coronavirus disease 2019 (COVID-19). It contains four structural proteins, including spike (S), envelope (E), membrane (M), and nucleocapsid (N) proteins. Among them, S protein plays the most important roles in viral attachment, fusion, and entry, and it serves as a target for development of antibodies, entry inhibitors, and vaccines. The S protein mediates viral entry into host cells by first binding to a host receptor through the receptor-binding domain (RBD) in the S1 subunit and then fusing the viral and host membranes through the S2 subunit. SARS-COV and MERS-COV RBDs recognize different receptors. SARS-COV recognizes angiotensin-converting enzyme 2 (ACE2) as its receptor, whereas MERS-COV recognizes dipeptidyl peptidase 4 (DPP4) as its receptor. Similar to SARS-COV, SARS-COV-2 also recognizes ACE2 as its host receptor binding to viral S protein.

[0006] As of Apr. 25, 2020, a total of 2.84 million confirmed cases of COVID-19 were reported, including 199,000 deaths, in the United States and at least 85 other countries and/or territories. Currently, the intermediate host of SARS-COV-2 is still unknown, and no effective prophylactics or therapeutics are available. This calls for the immediate development of vaccines and antiviral drugs for prevention and treatment of COVID-19.

[0007] In addition, due to the ability of SARS-COV-2 to be spread through an airborne route, SARS-COV-2 presents a particular threat to the health of large populations of people throughout the world. Accordingly, methods to immunize people before infection, diagnose infection, immunize people during infection, and treat infected persons infected with SARS-COV-2 are urgently needed.

### SUMMARY OF THE INVENTION

[0008] This disclosure addresses the need mentioned above in a number of aspects by providing neutralizing anti-SARS-COV-2 antibodies or antigen-binding fragments thereof.

[0009] In one aspect, this disclosure provides an isolated anti-SARS-COV-2 antibody or antigen-binding fragment thereof that binds specifically to a SARS-COV-2 antigen. In some embodiments, the SARS-COV-2 antigen comprises a Spike (S) polypeptide, such as an S polypeptide of a human or an animal SARS-COV-2. In some embodiments, the SARS-COV-2 antigen comprises the receptor-binding domain (RBD) of the S polypeptide. In some embodiments, the RBD comprises amino acids 319-541 of the S polypeptide.

[0010] In some embodiments, the antibody or antigen-binding fragment thereof is capable of neutralizing a plurality of SARS-COV-2 strains.

[0011] In some embodiments, the antibody or antigen-binding fragment thereof comprising:
[0012] three heavy chain complementarity determining regions (HCDRs) (HCDR1, HCDR2, and HCDR3) of a heavy chain variable region having an amino acid sequence of SEQ ID NO: 1, 3, 5, 7, 9, 11, 13, 15, 17, 19, 21, 23, 25, 27, 29, 31, 33, 35, 37, 39, 41, 43, 45, 47, 49, 51, 53, 55, 57, 59, 61, 63, 65, 67, 69, 71, 73, 75, 77, 79, 81, 83, 85, 87, 89, 91, 93, 95, 97, 99, 101, 103, 105, 107, 109, 111, 113, 115, 117, 119, 121, 123, 125, 127, 129, 131, 133, 135, 137, 139, 141, 143, 145, 147, 149, 151, 153, 155, 157, 159, 161, 163, 165, 167, 169, 171, 173, 175, 177, 179, 181, 183, 185, 187, 189, 191, 193, 195, 197, 199, 201, 203, 205, 207, 209, 211, 213, 215, 217, 219, 221, 223, 225, 227, 229, 231, 233, 235, 237, 239, 241, 243, 245, 247, 249, 251, 253, 255, 257, 259, 261, 263, 265, 267, 269, 271, 273, 275, 277, 279, 281, 283, 285, 287, 289, 291, 293, 295, 297, 299, 301, 303, 305, 307, 309, 311, 313, 315, 317, 319, 321, 323, 325, 327, 329, 331, 333, 335, 337, 339, 341, 343, 345, 347, 349, 351, 353, 355, 357, 359, 361, 363, 365, 367, 369, 371, 373, 375, 377, 379, 381, 383, 385, 387, 389, 391, 393, 395, 397, 399, 401, 403, 405, 407, 409, 411, 413, 415, 417, 419, 421, 423, 425, 427, 429, 431, 433, 435, 437, 439, 441, 443, 445, 447, 449, 451, or 453; and
[0013] three light chain CDRs (LCDR1, LCDR2, and LCDR3) of a light chain variable region having the amino acid sequence of SEQ ID NO: 2, 4, 6, 8, 10, 12, 14, 16, 18, 20, 22, 24, 26, 28, 30, 32, 34, 36, 38, 40, 42, 44, 46, 48, 50, 52, 54, 56, 58, 60, 62, 64, 66, 68, 70, 72, 74, 76, 78, 80, 82, 84, 86, 88, 90, 92, 94, 96, 98, 100, 102, 104, 106, 108, 110, 112, 114, 116, 118, 120, 122, 124, 126, 128, 130, 132, 134, 136, 138, 140, 142, 144, 146, 148, 150, 152, 154, 156, 158, 160, 162, 164, 166, 168, 170, 172, 174, 176, 178, 180, 182, 184, 186, 188, 190, 192, 194, 196, 198, 200, 202, 204, 206, 208, 210, 212, 214, 216, 218, 220, 222, 224, 226, 228, 230, 232, 234, 236, 238, 240, 242, 244, 246, 248, 250, 252, 254, 256, 258, 260, 262, 264, 266, 268, 270, 272, 274, 276, 278, 280, 282, 284, 286, 288, 290, 292, 294, 296, 298, 300, 302, 304, 306, 308, 310, 312, 314, 316, 318, 320, 322, 324, 326, 328, 330, 332, 334, 336, 338, 340, 342, 344, 346, 348, 350, 352, 354, 356, 358, 360, 362, 364, 366, 368, 370, 372, 374, 376, 378, 380, 382, 384, 386, 388, 390, 392, 394, 396, 398, 400, 402, 404, 406, 408, 410, 412, 414, 416, 418, 420, 422, 424, 426, 428, 430, 432, 434, 436, 438, 440, 442, 444, 446, 448, 450, 452, or 454.

[0014] In some embodiments, the antibody or antigen-binding fragment thereof comprising:
[0015] a heavy chain variable region having an amino acid sequence with at least 75% identity to SEQ ID NO: 1, 3, 5, 7, 9, 11, 13, 15, 17, 19, 21, 23, 25, 27, 29, 31, 33, 35, 37, 39, 41, 43, 45, 47, 49, 51, 53, 55, 57, 59, 61, 63, 65, 67, 69, 71, 73, 75, 77, 79, 81, 83, 85, 87, 89, 91, 93, 95, 97, 99, 101, 103, 105, 107, 109, 111, 113, 115, 117, 119, 121, 123, 125, 127, 129, 131, 133, 135, 137, 139, 141, 143, 145, 147, 149, 151, 153, 155, 157, 159, 161, 163, 165, 167, 169, 171, 173, 175, 177, 179, 181, 183, 185, 187, 189, 191, 193, 195, 197, 199, 201, 203, 205, 207, 209, 211, 213, 215, 217, 219, 221, 223, 225, 227, 229, 231, 233, 235, 237, 239, 241, 243, 245, 247, 249, 251, 253, 255, 257, 259, 261, 263, 265, 267, 269, 271, 273, 275, 277, 279, 281, 283, 285, 287, 289, 291, 293, 295, 297, 299, 301, 303, 305, 307, 309, 311, 313, 315, 317, 319, 321, 323, 325, 327, 329, 331, 333, 335, 337, 339, 341, 343, 345, 347, 349, 351, 353, 355, 357, 359, 361, 363, 365, 367, 369, 371, 373, 375, 377, 379, 381, 383, 385, 387, 389, 391, 393, 395, 397, 399, 401, 403, 405, 407, 409, 411, 413, 415, 417, 419, 421, 423, 425, 427, 429, 431, 433, 435, 437, 439, 441, 443, 445, 447, 449, 451, or 453; and
[0016] a light chain variable region having an amino acid sequence with at least 75% identity to SEQ ID NO: 2, 4, 6, 8, 10, 12, 14, 16, 18, 20, 22, 24, 26, 28, 30, 32, 34, 36, 38, 40, 42, 44, 46, 48, 50, 52, 54, 56, 58, 60, 62, 64, 66, 68, 70, 72, 74, 76, 78, 80, 82, 84, 86, 88, 90, 92, 94, 96, 98, 100, 102, 104, 106, 108, 110, 112, 114, 116, 118, 120, 122, 124, 126, 128, 130, 132, 134, 136, 138, 140, 142, 144, 146, 148, 150, 152, 154, 156, 158, 160, 162, 164, 166, 168, 170, 172, 174, 176, 178, 180, 182, 184, 186, 188, 190, 192, 194, 196, 198, 200, 202, 204, 206, 208, 210, 212, 214, 216, 218, 220, 222, 224, 226, 228, 230, 232, 234, 236, 238, 240, 242, 244, 246, 248, 250, 252, 254, 256, 258, 260, 262, 264, 266, 268, 270, 272, 274, 276, 278, 280, 282, 284, 286, 288, 290, 292, 294, 296, 298, 300, 302, 304, 306, 308, 310, 312, 314, 316, 318, 320, 322, 324, 326, 328, 330, 332, 334, 336, 338, 340, 342, 344, 346, 348, 350, 352, 354, 356, 358, 360, 362, 364, 366, 368, 370, 372, 374, 376, 378, 380, 382, 384, 386, 388, 390, 392, 394, 396, 398, 400, 402, 404, 406, 408, 410, 412, 414, 416, 418, 420, 422, 424, 426, 428, 430, 432, 434, 436, 438, 440, 442, 444, 446, 448, 450, 452, or 454.

[0017] In some embodiments, the antibody or antigen-binding fragment thereof of comprising:
[0018] a heavy chain variable region having the amino acid sequence of SEQ ID NO: 1, 3, 5, 7, 9, 11, 13, 15, 17, 19, 21, 23, 25, 27, 29, 31, 33, 35, 37, 39, 41, 43, 45, 47, 49, 51, 53, 55, 57, 59, 61, 63, 65, 67, 69, 71, 73, 75, 77, 79, 81, 83, 85, 87, 89, 91, 93, 95, 97, 99, 101, 103, 105, 107, 109, 111, 113, 115, 117, 119, 121, 123, 125, 127, 129, 131, 133, 135, 137, 139, 141, 143, 145, 147, 149, 151, 153, 155, 157, 159, 161, 163, 165, 167, 169, 171, 173, 175, 177, 179, 181, 183, 185, 187, 189, 191, 193, 195, 197, 199, 201, 203, 205, 207, 209, 211, 213, 215, 217, 219, 221, 223, 225, 227, 229, 231, 233, 235, 237, 239, 241, 243, 245, 247, 249, 251, 253, 255, 257, 259, 261, 263, 265, 267, 269, 271, 273, 275, 277, 279, 281, 283, 285, 287, 289, 291, 293, 295, 297, 299, 301, 303, 305, 307, 309, 311, 313, 315, 317, 319, 321, 323, 325, 327, 329, 331, 333, 335, 337, 339, 341, 343, 345, 347, 349, 351, 353, 355, 357, 359, 361, 363, 365, 367, 369, 371, 373, 375, 377, 379, 381, 383, 385, 387, 389, 391, 393, 395, 397, 399, 401, 403, 405, 407, 409, 411, 413, 415, 417, 419, 421, 423, 425, 427, 429, 431, 433, 435, 437, 439, 441, 443, 445, 447, 449, 451, or 453; and
[0019] a light chain variable region having the amino acid sequence of SEQ ID NO: 2, 4, 6, 8, 10, 12, 14, 16, 18, 20, 22, 24, 26, 28, 30, 32, 34, 36, 38, 40, 42, 44, 46, 48, 50, 52, 54, 56, 58, 60, 62, 64, 66, 68, 70, 72, 74, 76, 78, 80, 82, 84, 86, 88, 90, 92, 94, 96, 98, 100, 102, 104, 106, 108, 110, 112, 114, 116, 118, 120, 122, 124, 126, 128, 130, 132, 134, 136, 138, 140, 142, 144, 146, 148, 150, 152, 154, 156, 158, 160, 162, 164, 166, 168, 170, 172, 174, 176, 178, 180, 182, 184, 186, 188, 190, 192, 194, 196, 198, 200, 202, 204, 206, 208, 210, 212, 214, 216, 218, 220, 222, 224, 226, 228, 230, 232, 234, 236, 238, 240, 242, 244, 246, 248, 250, 252, 254, 256, 258, 260, 262, 264, 266, 268, 270, 272, 274, 276, 278, 280, 282, 284, 286, 288, 290, 292, 294, 296, 298, 300, 302, 304, 306, 308, 310, 312, 314, 316, 318, 320, 322, 324, 326, 328, 330, 332, 334, 336, 338, 340, 342, 344, 346, 348, 350, 352, 354, 356, 358, 360, 362, 364, 366, 368, 370, 372, 374, 376, 378, 380, 382, 384, 386, 388, 390, 392, 394, 396, 398, 400, 402, 404, 406, 408, 410, 412, 414, 416, 418, 420, 422, 424, 426, 428, 430, 432, 434, 436, 438, 440, 442, 444, 446, 448, 450, 452, or 454.

[0020] The antibody or antigen-binding fragment thereof comprising: a heavy chain variable region and a light chain variable region comprise the respective amino acid sequences of SEQ ID NOs: 1-2, 3-4, 5-6, 7-8, 9-10, 11-12, 13-14, 15-16, 17-18, 19-20, 21-22, 23-24, 25-26, 27-28, 29-30, 31-32, 33-34, 35-36, 37-38, 39-40, 41-42, 43-44, 45-46, 47-48, 49-50, 51-52, 53-54, 55-56, 57-58, 59-60, 61-62, 63-64, 65-66, 67-68, 69-70, 71-72, 73-74, 75-76, 77-78, 79-80, 81-82, 83-84, 85-86, 87-88, 89-90, 91-92, 93-94, 95-96, 97-98, 99-100, 101-102, 103-104, 105-106, 107-108, 109-110, 111-112, 113-114, 115-116, 117-118, 119-120, 121-122, 123-124, 125-126, 127-128, 129-130, 131-132, 133-134, 135-136, 137-138, 139-140, 141-142, 143-144, 145-146, 147-148, 149-150, 151-152, 153-154, 155-156, 157-158, 159-160, 161-162, 163-164, 165-166, 167-168, 169-170, 171-172, 173-174, 175-176, 177-178, 179-180, 181-182, 183-184, 185-186, 187-188, 189-190, 191-192, 193-194, 195-196, 197-198, 199-200, 201-202, 203-204, 205-206, 207-208, 209-210, 211-212, 213-214, 215-216, 217-218, 219-220, 221-222, 223-224, 225-226, 227-228, 229-230, 231-232, 233-234, 235-236, 237-238, 239-240, 241-242, 243-244, 245-246, 247-248, 249-250, 251-252, 253-254, 255-256, 257-258, 259-260, 261-262, 263-264, 265-266, 267-268, 269-270, 271-272, 273-274, 275-276, 277-278, 279-280, 281-282, 283-284, 285-286, 287-288, 289-290, 291-292, 293-294, 295-296, 297-298, 299-300, 301-302, 303-304, 305-306, 307-308, 309-310, 311-312, 313-314, 315-316, 317-318, 319-320, 321-322, 323-324, 325-326, 327-328, 329-330, 331-332, 333-334, 335-336, 337-338, 339-340, 341-342, 343-344, 345-346, 347-348, 349-350, 351-352, 353-354, 355-356, 357-358, 359-360, 361-362, 363-364, 365-366, 367-368, 369-370, 371-372, 373-374, 375-376, 377-378, 379-380, 381-382, 383-384, 385-386, 387-388, 389-390, 391-392, 393-394, 395-396, 397-398, 399-400, 401-402, 403-404, 405-406, 407-408, 409-410, 411-412, 413-414, 415-416, 417-418, 419-420, 421-422, 423-424, 425-426, 427-428, 429-430, 431-432, 433-434, 435-436, 437-438, 439-440, 441-442, 443-444, 445-446, 447-448, 449-450, 451-452, or 453-454.

[0021] In some embodiments, the antibody or antigen-binding fragment thereof is a multivalent antibody comprising (a) a first target binding site that specifically binds to an epitope within the S polypeptide, and (b) a second target binding site that binds to an epitope on a different epitope on the S polypeptide or a different molecule. In some embodiments, the multivalent antibody is a bivalent or bispecific antibody.

[0022] In some embodiments, the antibody or the antigen-binding fragment thereof further comprises an Fc region or a variant Fc region. In some embodiments, the antibody is a monoclonal antibody. In some embodiments, the antibody is a chimeric antibody, a humanized antibody, or humanized monoclonal antibody. In some embodiments, the antibody is a single-chain antibody, Fab or Fab2 fragment.

[0023] In some embodiments, the antibody or antigen-binding fragment thereof is detectably labeled or conjugated to a toxin, a therapeutic agent, a polymer, a receptor, an enzyme, or a receptor ligand. In some embodiments, the polymer is polyethylene glycol (PEG).

[0024] Also provided is a pharmaceutical composition comprising the antibody or antigen-binding fragment thereof described above and optionally a pharmaceutically acceptable carrier or excipient. In some embodiments, the pharmaceutical comprises two or more of the antibody or antigen-binding fragment thereof of described above.

[0025] In some embodiments, the pharmaceutical composition further comprises a second therapeutic agent. In some embodiments, the second therapeutic agent comprises an anti-inflammatory drug or an antiviral compound. In some embodiments, the antiviral compound comprises: a nucleoside analog, a peptoid, an oligopeptide, a polypeptide, a protease inhibitor, a 3C-like protease inhibitor, a papain-like protease inhibitor, or an inhibitor of an RNA dependent RNA polymerase. In some embodiments, the antiviral compound is selected from the group consisting of: acyclovir, gancyclovir, vidarabine, foscarnet, cidofovir, amantadine, ribavirin, trifluorothymidine, zidovudine, didanosine, zalcitabine, and interferon. In some embodiments, the interferon is an interferon-α or an interferon-ß.

[0026] Also within the scope of this disclosure is use of the pharmaceutical composition, as described above, in the preparation of a medicament for the diagnosis, prophylaxis, treatment, or combination thereof of a condition resulting from a SARS-COV-2.

[0027] In another aspect, this disclosure also provides (i) a nucleic acid molecule encoding a polypeptide chain of the antibody or antigen-binding fragment thereof described above; (ii) a vector comprising the nucleic acid molecule described above; and (iii) a cultured host cell comprising the vector described above.

[0028] Also provided is a method of preparing an antibody, or antigen-binding portion thereof, comprising: (a) obtaining the cultured host cell described above; (b) culturing the cultured host cell in a medium under conditions permitting expression of a polypeptide encoded by the vector and assembling of an antibody or fragment thereof; and (c) purifying the antibody or fragment from the cultured cell or the medium of the cell.

[0029] In another aspect, this disclosure additionally provides (i) a kit comprising a pharmaceutically acceptable dose unit of the antibody or antigen-binding fragment thereof or the pharmaceutical composition, as described above; and (ii) a kit for the diagnosis, prognosis or monitoring the treatment of SARS-COV-2 in a subject, comprising: the antibody or antigen-binding fragment thereof described above; and a least one detection reagent that binds specifically to the antibody or antigen-binding fragment thereof.

[0030] In another aspect, this disclosure further provides a method of neutralizing SARS-COV-2 in a subject. The method comprises administering to a subject in need thereof a therapeutically effective amount of the antibody or antigen-binding fragment thereof or a therapeutically effective amount of the pharmaceutical composition, as described above.

[0031] In another aspect, this disclosure also provides a method of preventing or treating a SARS-CoV-2 infection. The method comprises administering to a subject in need thereof a therapeutically effective amount of the antibody or antigen-binding fragment thereof or a therapeutically effective amount of the pharmaceutical composition, as described above.

[0032] In another aspect, this disclosure additionally provides a method of neutralizing SARS-CoV-2 in a subject. The method comprises administering to a subject in need thereof a therapeutically effective amount of a first antibody or antigen-binding fragment thereof and a second antibody or antigen-binding fragment thereof or a therapeutically effective amount of the pharmaceutical composition, as described above, wherein the first antibody or antigen-binding fragment thereof and the second antibody or antigen binding fragment thereof exhibit synergistic activity.

[0033] In yet another aspect, this disclosure provides a method of preventing or treating a SARS-CoV-2 infection. The method comprises administering to a subject in need thereof a therapeutically effective amount of a first antibody or antigen-binding fragment thereof and a second antibody or antigen-binding fragment thereof; or a therapeutically effective amount of the pharmaceutical composition, as described above, wherein the first antibody or antigen-binding fragment thereof and the second antibody or antigen binding fragment thereof exhibit synergistic activity.

[0034] In some embodiments, the method further comprises administering to the subject a therapeutically effective amount of a second therapeutic agent or therapy.

[0035] In some embodiments, the first antibody or antigen-binding fragment thereof is administered before, after, or concurrently with the second antibody or antigen-binding fragment thereof.

[0036] In some embodiments, the second therapeutic agent comprises an anti-inflammatory drug or an antiviral compound. In some embodiments, the antiviral compound comprises: a nucleoside analog, a peptoid, an oligopeptide, a polypeptide a protease inhibitor, a 3C-like protease inhibitor, a papain-like protease inhibitor, or an inhibitor of an RNA dependent RNA polymerase. In some embodiments, the antiviral compound is selected from the group consisting of: acyclovir, gancyclovir, vidarabine, foscarnet, cidofovir, amantadine, ribavirin, trifluorothymidine, zidovudine, didanosine, zalcitabine, and an interferon. In some embodiments, the interferon is an interferon-α or an interferon-ß.

[0037] In some embodiments, the antibody or antigen-binding fragment thereof is administered to the subject intravenously, subcutaneously, or intraperitoneally. In some embodiments, the antibody or antigen-binding fragment thereof is administered prophylactically or therapeutically.

[0038] In yet another aspect, this disclosure also provides a method for detecting the presence of SARS COV-2 in a sample. The method comprises: (a) contacting a sample with the antibody or antigen-binding fragment thereof described above; and (b) determining binding of the antibody or antigen-binding fragment to one or more SARS COV-2 antigens, wherein binding of the antibody to the one or more SARS COV-2 antigens is indicative of the presence of SARS COV-2 in the sample.

[0039] In some embodiments, the SARS-COV-2 antigen comprises a S polypeptide. In some embodiments, the S polypeptide is an S polypeptide of a human or an animal SARS-COV-2. In some embodiments, the SARS-COV-2 antigen comprises the receptor-binding domain (RBD) of the S polypeptide. In some embodiments, the RBD comprises amino acids 319-541 of the S polypeptide.

[0040] In some embodiments, the antibody or antigen-binding fragment thereof is conjugated to a label. In some embodiments, the step of detecting comprises contacting a secondary antibody with the antibody or antigen-binding fragment thereof and wherein the secondary antibody comprises a label. In some embodiments, the label is selected from the group consisting of a fluorescent label, a chemiluminescent label, a radiolabel, and an enzyme.

[0041] In some embodiments, the step of detecting comprises detecting fluorescence or chemiluminescence. In some embodiments, the step of detecting comprises a competitive binding assay or ELISA.

[0042] In some embodiments, the sample is a blood sample. In some embodiments, the method further comprises binding the sample to a solid support. In some embodiments, the solid support is selected from microparticles, microbeads, magnetic beads, and an affinity purification column.

[0043] The foregoing summary is not intended to define every aspect of the disclosure, and additional aspects are described in other sections, such as the following detailed description. The entire document is intended to be related as a unified disclosure, and it should be understood that all combinations of features described herein are contemplated, even if the combination of features are not found together in the same sentence, or paragraph, or section of this document. Other features and advantages of the invention will become apparent from the following detailed description. It should be understood, however, that the detailed description and the specific examples, while indicating specific embodiments of the disclosure, are given by way of illustration only, because various changes and modifications within the spirit and scope of the disclosure will become apparent to those skilled in the art from this detailed description.

### BRIEF DESCRIPTION OF THE FIGURES

[0044] FIGS. 1A, 1B, 1C, 1D, 1E, and 1F are a set of diagrams showing the results of the plasma ELISAs and neutralizing activity of the anti-SARS-COV-2 antibodies. FIGS. 1A and 1B show plasma IgG antibody binding to SARS-COV-2 RBD (FIG. 1A) and N protein (FIG. 1B), and FIGS. 1C, 1D, and 1E show plasma neutralizing activity 12 months after infection (N=63). FIGS. 1A and 1B show ELISA curves from non-vaccinated (black lines) individuals, as well as individuals who received one or two doses of a COVID-19 mRNA vaccine (blue lines), respectively (left panels). Area under the curve (AUC) over time in non-vaccinated and vaccinated individuals, as indicated (middle panels). Two individuals who received their first dose of vaccine 24-48 hours before sample collection are depicted in purple. Lines connect longitudinal samples. Numbers in red indicate geometric mean AUC at the indicated timepoint. Right most panel shows combined values as a dot plot for all individuals. c, ranked average NT50 at 1.3 months (light grey) and 6.2 months (dark grey), as well as at 12 months for non-vaccinated (orange) individuals, and individuals who received one or two doses (blue circles) of a COVID-19 mRNA vaccine, respectively. Two individuals who received their first dose of vaccine 24-48 hours before sample collection are depicted in purple. FIGS. 1D and 1E show NT50 over time in non-vaccinated (FIG. 1D) and vaccinated individuals (FIG. 1E). Lines connect longitudinal samples from the same individual. Two individuals who received their first dose of vaccine 24-48 hours before sample collection are depicted in purple. Red numbers indicate the geometric mean NT50 at the indicated timepoint. Statistical significance in FIGS. 1A, 1B, 1D, and 1E was determined using the Friedman Multiple Comparisons test. f, Plasma neutralizing activity against SARS-COV-2 variants of concern. All experiments were performed at least in duplicate.

[0045] FIGS. 2A, 2B, 2C, 2D, 2E, and 2F are a set of diagrams showing anti-SARS-COV-2 RBD B cell memory. FIG. 2A shows representative flow cytometry plots showing dual AlexaFluor-647-RBD WT, or AlexaFluor-647-K417N/E484K/N501Y mutant and PE-RBD-binding B cells for 6 individuals. Vaccine recipients are indicated in red. The gating strategy is shown in FIG. 8. Percentage of antigen-specific B cells is indicated. As in FIG. 2A, FIG. 2B shows a graph summarizing the number of antigen binding memory B cells per 2 million B cells (also see FIGS. 10B and 10C) obtained at 1.3, 6.2, and 12 months from 40 randomly selected individuals (vaccinees n=20, and non-vaccinees, n=20). Each dot is one individual. Red horizontal bars indicate geometric mean values. Statistical significance was determined using two-tailed Mann-Whitney U-tests. FIG. 2C shows pie charts show the distribution of antibody sequences from 6 individuals after 1.3³ (upper panel) or 6.2⁴ (middle panel) or 12 months (lower panel). The number in the inner circle indicates the number of sequences analyzed for the individual denoted above the circle. Pie slice size is proportional to the number of clonally related sequences. The black outline indicates the frequency of clonally expanded sequences detected in each participant. Colored slices indicate persisting clones (same IGV and IGJ genes, with highly similar CDR3s) found at both timepoints in the same participant. Grey slices indicate clones unique to the timepoint. White indicates sequences isolated once, and white slices indicate singlets found at both timepoints. FIG. 2D shows a circos plot depicting the relationship between antibodies that share V and J gene segment sequences at both IGH and IGL. Purple, green, and grey lines connect related clones, clones and singles, and singles to each other, respectively. FIG. 2E shows the number of clonally expanded B cells (per 10 million B cells) at indicated time points in 6 individuals. Colors indicate shared clones appearing at different time points. Statistical significance was determined using Wilcoxon matched-pairs signed rank test. Vaccinees are marked in red. FIG. 2F shows the number of somatic nucleotide mutations in the IGVH and IGVL in antibodies (also table 8) obtained after 1.3 or 6.2 or 12 months from 10 donors (vaccinees, n=6, non-vaccinees, n=4). Red horizontal bars indicate mean values. Statistical significance was determined using two-tailed Mann-Whitney U-tests.

[0046] FIGS. 3A, 3B, and 3C are a set of diagrams showing anti-SARS-COV-2 RBD monoclonal antibodies. FIG. 3A is a graph showing the ELISA binding EC₅₀ (Y axis) for SARS-COV-2 RBD by antibodies isolated at 1.3³ 6.2⁴ and 12 months after infection. Statistical significance was determined using the Kruskal-Wallis test. FIGS. 3B and 3C are graphs showing anti-SARS-COV-2 neutralizing activity of monoclonal antibodies measured by a SARS-COV-2 pseudovirus neutralization assay^{3,10}. Half-maximal inhibitory concentration (IC₅₀) values for antibodies isolated at 1.3³ 6.2⁴ and 12 months after infection. FIG. 3B shows wild-type SARS-COV-2 (Wuhan-Hu-1 strain³⁸) neutralization by monoclonal antibodies. Each dot represents one antibody. Pie charts illustrate the fraction of non-neutralizing (IC50>1000 ng/ml) antibodies (grey slices), inner circle shows the number of antibodies tested. Horizontal bars and red numbers indicate geometric mean values. Statistical significance was determined through the Kruskal Wallis test with subsequent Dunn's multiple comparisons. FIG. 3C is a heat map showing the neutralizing activity of clonally related antibodies against wt-SARS-COV-2 over time. White tiles indicate no clonal relative at the respective time point. Clones are ranked from left to right by the potency of the 12-month progeny antibodies, which are denoted below the tiles. For FIGS. 3B and 3C, antibodies with IC₅₀ values above 1000 ng/ml were plotted at 1000 ng/ml. The average of two independent experiments is shown.

[0047] FIGS. 4A, 4B, 4C, and 4D are a set of diagrams showing epitope targeting of anti-SARS-CoV-2 RBD antibodies. FIG. 4A is a schematic representation of the BLI experiment (left) and IC₅₀ values for randomly selected neutralizing (middle) and non-neutralizing (right) antibodies isolated at 1.3- and 12-months post-infection. Red horizontal bars indicate geometric mean values. Statistical significance was determined using the Mann-Whitney test. FIG. 4B shows K_{D} values of the neutralizing (green) and non-neutralizing (red) antibodies isolated at 1.3 and 12 months after infection. Red horizontal bars indicate geometric mean values. Statistical significance was determined using the Kruskal Wallis test with subsequent Dunn's multiple comparisons. BLI traces can be found in FIG. 13. FIG. 4C shows the biolayer interferometry results presented as a heat-map of relative inhibition of Ab2 binding to the preformed Ab1-RBD complexes (grey=no binding, orange-intermediate binding, red-high binding). Values are normalized through the subtraction of the autologous antibody control. BLI traces can be found in FIG. 14. FIG. 4D shows neutralization of the indicated mutants for antibodies shown in FIGS. 4A, 4B, and 4C. Pie charts illustrate the fraction of antibodies that are poorly/non-neutralizing (IC₅₀ 100-1000 ng/ml, red), intermediate neutralizing (IC₅₀ 10-100 ng/ml, pink), and potently neutralizing (IC₅₀ 0-10 ng/ml, white) for each mutant. The number in the inner circle shows the number of antibodies tested.

[0048] FIGS. 5A, 5B, and 5C are a set of diagrams showing clonal evolution of anti-SARS-COV-2 RBD antibodies. FIG. 5A shows graphs depicting affinities (Y axis) plotted against neutralization activity (X axis) for clonal antibody pairs isolated 1.3 (top) and 12 months (bottom) after infection. FIG. 5B shows BLI affinity measurements for same paired 1.3- and 12-month antibodies as in FIG. 5A. FIG. 5C shows IC₅₀ values for 15 neutralizing antibody pairs against indicated mutant SARS-COV-2 pseudoviruses. Antibodies are divided into groups i-iii, based on neutralizing activity: (i) potent clonal pairs that do not improve over time, (ii) clonal pairs that show increased activity over time, and (iii) and clonal pairs showing decreased neutralization activity after 12 months. Antibody class assignment based on initial (1.3 m) sensitivity to mutation is indicated on the right. Red stars indicate antibodies that neutralize all RBD mutants tested. Color gradient indicates IC₅₀ values ranging from 0 (white) to 1000 ng/ml (red).

[0049] FIGS. 6A, 6B, 6C, and 6D are a set of diagrams showing association of persistence of symptoms (Sx) 12 months after infection with various clinical and serological parameters. FIGS. 6A and 6B show acute disease severity as assessed with the WHO Ordinal Scale of Clinical Improvement (FIG. 6A) and duration of acute phase symptoms (FIG. 6B) in individuals reporting persistent symptoms (+) compared to individuals who are symptom-free (−) 12 months post-infection. FIG. 6C shows proportion of individuals reporting persistent symptoms (black area) compared to individuals who are symptom-free (grey area) 12 months after infection grouped by vaccination status. FIG. 6D shows anti-RBD IgG, anti-N IgG, NT50 titers, as well as the RBD/N IgG ratio at 12 months after infection in individuals reporting persistent symptoms (+) compared to individuals who are symptom-free (−) 12 months post-infection. Statistical significance was determined using the Mann-Whitney test in FIGS. 6A, 6B, and 6D and using the Fisher's exact test in FIG. 6C.

[0050] FIGS. 7A, 7B, 7C, 7D, 7E, 7F, 7G, 7H, 7I, 7J, 7K, 7L, 7M, 7N, 7O, 7P, 7Q, 7R, and 7S are a set of diagrams showing plasma activity of the anti-SARS-COV-2 antibodies. FIGS. 7A, 7B, 7C, 7D, 7E, 7F, 7G, and 7H show the ELISA results for plasma against SARS-COV-2 RBD 12 months after infection (N=63). Non-vaccinated individuals are depicted with black circles and lines, and vaccinated individuals are depicted in blue throughout. Two outlier individuals who received their first dose of vaccine 24-48 hours before sample collection are depicted as purple circles. FIGS. 7A, 7B, 7C, 7D, 7E, 7F, 7G, and 7H show IgM (FIGS. 7A, 7B, 7C, and 7D) and IgA (FIGS. 7E, 7F, 7G, and 7H) antibody binding to SARS-COV-2 RBD 12 months after infection. FIGS. 7A and 7E show ELISA curves from non-vaccinated (black lines) individuals, as well as individuals who received one or two doses (blue lines) of a COVID-19 mRNA vaccine (left panels). Area under the curve (AUC) over time in non-vaccinated (FIGS. 7B and 7F) and vaccinated individuals (FIGS. 7C and 7G). Lines in FIGS. 7B, 7C, 7F, and 7G connect longitudinal samples. FIGS. 7D and 7H are boxplots showing AUC values of all 63 individuals, as indicated. FIGS. 7I, 7J, 7K, 7L, 7M, 7N, 7O, 7P, 7Q, and 7R show correlation of serological parameters in non-vaccinated (black circles and black statistics) and vaccinated (blue circles and blue statistics) individuals. Two individuals who received their first dose of vaccine 24-48 hours before sample collection are depicted as purple circles. FIGS. 7I, 7J, and 7K show correlation of 12-month titers of anti-RBD IgG and NT50 (FIG. 7I), anti-RBD IgG and N IgG (FIG. 7J), and anti-N IgG and NT50 (FIG. 7K). FIGS. 7L, 7M, and 7M show correlation of remaining plasma titers at 12 months (expressed as the fraction of 1.3-month titers on the Y axis) and participant age for anti-RBD IgG (FIG. 7L), anti-N IgG (FIG. 7M), and NT50 (FIG. 7N). FIGS. 7O, 7P, 7Q, 7R, and 7S show correlation of remaining plasma titers at 12 months (expressed as the relative change from 1.3-month titers on the Y axis) and initial plasma titers at 1.3 months for anti-RBD IgG (FIG. 7O), anti-RBD IgM (FIG. 7P), anti-RBD IgA (FIG. 7Q), anti-N IgG (FIG. 7M), and NT50 (FIG. 7S). Statistical significance was determined using the Spearman correlation test for the non-vaccinated and vaccinated subgroups independently. All experiments were performed at least in duplicate.

[0051] FIGS. 8A, 8B, 8C, 8D, 8E, and 8F are a set of diagrams showing the results of flow cytometry. FIG. 8A shows the gating strategy. Gating was on singlets that were CD20⁺ or CD19⁺ and CD3-CD8-CD16-Ova−. Anti-IgG, IgM, IgA, IgD, CD71, and CD27 antibodies were used for B cell phenotype analysis. Sorted cells were RBD-PE″ and RBD/KEN-AF647⁺. FIGS. 8B and 8C show the results of flow cytometry showing the percentage of RBD-double positive (FIG. 8B) and 647-K417N/E484K/N501Y mutant RBD cross-reactive (FIG. 8C) memory B cells from 1.3 or 6- and 12-months post-infection in 10 selected participants. As in FIG. 2C, FIG. 8D are pie charts showing the distribution of antibody sequences from 4 individuals after 1.3³ (upper panel) or 6.2⁴ months (middle panel) or 12 months (lower panel). As in FIGS. 8B and 8C, FIG. 8E is a graph summarizing cell number (per 2 million B cells) of immunoglobulin class of antigens binding memory B cells in samples obtained at 1.3, 6.2, and 12 months. FIG. 8F is the same as FIG. 8D except summarizing percentage of CD71 positive activated antigen specific B cells. Each dot is one individual. Red horizontal bars indicate mean values. Statistical significance was determined using two-tailed Mann-Whitney U-tests.

[0052] FIGS. 9A, 9B, and 9C are a set of diagrams showing frequency distribution of human V genes. The graph shows a comparison of the frequency distributions of human V genes of anti-SARS-COV-2 antibodies from donors at 1.3³, 6.2⁴, 12 months after infection. FIG. 9A is a graph showing relative abundance of human IGVH genes Sequence Read Archive accession SRP010970 (green), convalescent vaccinees (blue), and convalescent non-vaccinees (orange). Statistical significance was determined by a two-sided binomial test. FIGS. 9B and 9C are similar to FIG. 9A except showing a comparison between antibodies from donors at 1.3 months³ (FIG. 9B), 6.2 month⁴ (FIG. 9C), and 12 months after infection.

[0053] FIGS. 10A, 10B, 10C, and 10D are a set of diagrams showing the results of the analysis of anti-RBD antibodies. As in FIG. 2E, FIG. 10A is a graph showing number of clonally expanded B cells (per 10 million B cells) at both time points from four individuals. Cells belonging to the same clone are marked in the same color. Statistical significance was determined using Wilcoxon matched-pairs signed rank tests. Vaccinees are marked in red. FIG. 2B shows the number of somatic nucleotide mutations in the IGVH (top) and IGVL (bottom) in antibodies obtained after 1.3 or 6.2 or 12 months from the indicated individual. FIG. 10C is similar to FIG. 10B except showing a comparison between new clones and conserved clones in 6 vaccinated convalescent individuals at 12 months after infection. FIG. 10 shows the amino acid length of the CDR3s at the IGVH and IGVL for each individual. Right panel shows all antibodies combined. The horizontal bars indicate the mean. Statistical significance was determined using two-tailed Mann-Whitney U-tests.

[0054] FIGS. 11A and 11B are a set of diagrams showing clonal evolution of RBD-binding memory B cells from ten convalescent individuals. FIG. 11A is a phylogenetic tree graph showing clones from convalescent non-vaccinees. FIG. 11B is the same as FIG. 10A except that the cells are from convalescent vaccinees. Numbers refer to mutations compared to the preceding vertical node. Colors indicate timepoint; grey, orange and red represent 1.3, 6, and 12 months, respectively, black dots indicate inferred nodes, and size is proportional to sequence copy number; GL=germline sequence.

[0055] FIGS. 12A, 12B, 12C, and 12D are a set of diagrams showing neutralization of WT RBD pseudovirus by mAbs. FIGS. 12A, 12B, and 12C show IC₅₀ values of mAbs isolated 12 months after infection from non-vaccinated and vaccinated individuals. FIG. 12A shows all 12-month antibodies irrespective of clonality. FIG. 12B shows singlets only, and FIG. 12C shows only antibodies belonging to a clone or shared over time. Statistical significance was determined using the Mann-Whitney test. Geometric mean IC₅₀ is indicated in red. FIG. 12D show IC₅₀ values of shared clones of mAbs cloned from B-cells from the initial 1.3- and 6.2, as well as a 12-month follow-up visit, divided by participant, as indicated. Lines connect clonal antibodies shared between time points. Antibodies with IC50>1000 ng/ml are plotted at 1000 ng/ml. Average IC₅₀ values of two independent experiments are shown.

[0056] FIGS. 13A and 13B are a set of diagrams showing the results of the biolayer interferometry affinity measurements. Graphs depict affinity measurements of neutralizing (green) and non-neutralizing (red) antibodies isolated 1.3 months (FIG. 13A) or 12 months (FIG. 13B) after infection.

[0057] FIGS. 14A and 14B are a set of diagrams showing the results of a biolayer interferometry antibody competition experiment. Anti-SARS-COV-2 RBD antibodies isolated 1.3 (FIG. 14A) or 12 months (FIG. 14B) after infection were assayed for competition with structurally characterized anti-RBD antibodies by biolayer interferometry experiments as in FIG. 4A. Graphs represent the binding of the second antibody (2nd Ab) to the preformed first antibody (1st Ab)-RBD complexes. Dotted line denotes when 1st Ab and 2nd Ab are the same. For each antibody group identified in FIG. 4C, the left graphs represent the binding of the class-representative C144, C121, C135 or C105^{3,20} (2nd Ab) to the candidate antibody (1st Ab)-RBD complex. The right graphs represent the binding of the candidate antibody (2nd Ab) to the complex of C144-RBD, C121-RBD, C135-RBD or C105-RBD (1st Ab). Antibodies belonging to the same groups are indicated to the left of the respective curves.

### DETAILED DESCRIPTION OF THE INVENTION

[0058] SARS-COV-2 represents a serious public health concern. Methods to diagnose and treat persons who are infected with SARS-COV-2 provide the opportunity to either prevent or control further spread of infection by SARS-COV-2. These methods are especially important due to the ability of SARS-COV-2 to infect persons through an airborne route.

[0059] This disclosure is based, at least in part, on unexpected neutralizing activities of the disclosed anti-SARS-COV-2 antibodies or antigen-binding fragments thereof. These antibodies and antigen-binding fragments constitute a novel therapeutic strategy in protection from SARS-CoV-2 infections.

### A. Broadly Neutralizing Anti-SARS-CoV-2 Antibodies

[0060] a. Antibodies

[0061] The disclosure involves neutralizing anti-SARS-COV-2 antibodies or antigen-binding fragments thereof. These antibodies refer to a class of neutralizing antibodies that neutralize multiple SARS-COV-2 virus strains. The antibodies are able to protect a subject prophylactically and therapeutically against a lethal challenge with a SARS-COV-2 virus.

[0062] In one aspect, this disclosure provides an isolated anti-SARS-COV-2 antibody or antigen-binding fragment thereof that binds specifically to a SARS-COV-2 antigen. In some embodiments, the SARS-COV-2 antigen comprises a portion of an S polypeptide, such as an S polypeptide of a human or an animal SARS-COV-2. In some embodiments, the SARS-COV-2 antigen comprises the receptor-binding domain (RBD) of the S polypeptide. In some embodiments, the RBD comprises amino acids 319-541 of the S polypeptide. In some embodiments, the antibody or antigen-binding fragment thereof is capable of neutralizing a plurality of SARS-COV-2 strains.

[0063] In some embodiments, the antibody or antigen-binding fragment thereof is capable of neutralizing a SARS-COV-2 virus at an IC50 concentration of less than 50 μg/ml.

[0064] The spike protein is important because it is present on the outside of intact SARS-COV-2. Thus, it presents a target that can be used to inhibit or eliminate an intact virus before the virus has an opportunity to infect a cell. A representative amino acid sequence is provided below:

(Accession ID: NC_045512.2; SEQ ID NO: 12793)
MFVFLVLLPLVSSQCVNLTTRTQLPPAYTNSFTRGVYYPDKVFRS
SVLHSTQDLFLPFFSNVTWFHAIHVSGTNGTKRFDNPVLPFNDGV
YFASTEKSNIIRGWIFGTTLDSKTQSLLIVNNATNVVIKVCEFQF
CNDPFLGVYYHKNNKSWMESEFRVYSSANNCTFEYVSQPFLMDLE
GKQGNFKNLREFVFKNIDGYFKIYSKHTPINLVRDLPQGFSALEP
LVDLPIGINITRFQTLLALHRSYLTPGDSSSGWTAGAAAYYVGYL
QPRTFLLKYNENGTITDAVDCALDPLSETKCTLKSFTVEKGIYQT
SNFRVQPTESIVRFPNITNLCPFGEVFNATRFASVYAWNRKRISN
CVADYSVLYNSASFSTFKCYGVSPTKLNDLCFTNVYADSFVIRGD
EVRQIAPGQTGKIADYNYKLPDDFTGCVIAWNSNNLDSKVGGNYN
YLYRLFRKSNLKPFERDISTEIYQAGSTPCNGVEGFNCYFPLQSY
GFQPTNGVGYQPYRVVVLSFELLHAPATVCGPKKSTNLVKNKCVN
FNFNGLTGTGVLTESNKKFLPFQQFGRDIADTTDAVRDPQTLEIL
DITPCSFGGVSVITPGTNTSNQVAVLYQDVNCTEVPVAIHADQLT
PTWRVYSTGSNVFQTRAGCLIGAEHVNNSYECDIPIGAGICASYQ
TQTNSPRRARSVASQSIIAYTMSLGAENSVAYSNNSIAIPTNFTI
SVTTEILPVSMTKTSVDCTMYICGDSTECSNLLLQYGSFCTQLNR
ALTGIAVEQDKNTQEVFAQVKQIYKTPPIKDFGGFNFSQILPDPS
KPSKRSFIEDLLFNKVTLADAGFIKQYGDCLGDIAARDLICAQKF
NGLTVLPPLLTDEMIAQYTSALLAGTITSGWTFGAGAALQIPFAM
QMAYRFNGIGVTQNVLYENQKLIANQFNSAIGKIQDSLSSTASAL
GKLQDVVNQNAQALNTLVKQLSSNFGAISSVLNDILSRLDKVEAE
VQIDRLITGRLQSLQTYVTQQLIRAAEIRASANLAATKMSECVLG
QSKRVDFCGKGYHLMSFPQSAPHGVVFLHVTYVPAQEKNFTTAPA
ICHDGKAHFPREGVFVSNGTHWFVTQRNFYEPQIITTDNTFVSGN
CDVVIGIVNNTVYDPLQPELDSFKEELDKYFKNHTSPDVDLGDIS
GINASVVNIQKEIDRLNEVAKNLNESLIDLQELGKYEQYIKWPWY
IWLGFIAGLIAIVMVTIMLCCMTSCCSCLKGCCSCGSCCKFDEDD
SEPVLKGVKLHYT

[0065] Listed below in TABLES 3 and 8 are the representativeive sequences of the antibodies disclosed herein.

[0066] In some embodiments, the antibody or antigen-binding fragment thereof comprising:
[0067] three heavy chain complementarity determining regions (HCDRs) (HCDR1, HCDR2, and HCDR3) of a heavy chain variable region having an amino acid sequence of SEQ ID NO: 1, 3, 5, 7, 9, 11, 13, 15, 17, 19, 21, 23, 25, 27, 29, 31, 33, 35, 37, 39, 41, 43, 45, 47, 49, 51, 53, 55, 57, 59, 61, 63, 65, 67, 69, 71, 73, 75, 77, 79, 81, 83, 85, 87, 89, 91, 93, 95, 97, 99, 101, 103, 105, 107, 109, 111, 113, 115, 117, 119, 121, 123, 125, 127, 129, 131, 133, 135, 137, 139, 141, 143, 145, 147, 149, 151, 153, 155, 157, 159, 161, 163, 165, 167, 169, 171, 173, 175, 177, 179, 181, 183, 185, 187, 189, 191, 193, 195, 197, 199, 201, 203, 205, 207, 209, 211, 213, 215, 217, 219, 221, 223, 225, 227, 229, 231, 233, 235, 237, 239, 241, 243, 245, 247, 249, 251, 253, 255, 257, 259, 261, 263, 265, 267, 269, 271, 273, 275, 277, 279, 281, 283, 285, 287, 289, 291, 293, 295, 297, 299, 301, 303, 305, 307, 309, 311, 313, 315, 317, 319, 321, 323, 325, 327, 329, 331, 333, 335, 337, 339, 341, 343, 345, 347, 349, 351, 353, 355, 357, 359, 361, 363, 365, 367, 369, 371, 373, 375, 377, 379, 381, 383, 385, 387, 389, 391, 393, 395, 397, 399, 401, 403, 405, 407, 409, 411, 413, 415, 417, 419, 421, 423, 425, 427, 429, 431, 433, 435, 437, 439, 441, 443, 445, 447, 449, 451, or 453; and
[0068] three light chain CDRs (LCDR1, LCDR2, and LCDR3) of a light chain variable region having the amino acid sequence of SEQ ID NO: 2, 4, 6, 8, 10, 12, 14, 16, 18, 20, 22, 24, 26, 28, 30, 32, 34, 36, 38, 40, 42, 44, 46, 48, 50, 52, 54, 56, 58, 60, 62, 64, 66, 68, 70, 72, 74, 76, 78, 80, 82, 84, 86, 88, 90, 92, 94, 96, 98, 100, 102, 104, 106, 108, 110, 112, 114, 116, 118, 120, 122, 124, 126, 128, 130, 132, 134, 136, 138, 140, 142, 144, 146, 148, 150, 152, 154, 156, 158, 160, 162, 164, 166, 168, 170, 172, 174, 176, 178, 180, 182, 184, 186, 188, 190, 192, 194, 196, 198, 200, 202, 204, 206, 208, 210, 212, 214, 216, 218, 220, 222, 224, 226, 228, 230, 232, 234, 236, 238, 240, 242, 244, 246, 248, 250, 252, 254, 256, 258, 260, 262, 264, 266, 268, 270, 272, 274, 276, 278, 280, 282, 284, 286, 288, 290, 292, 294, 296, 298, 300, 302, 304, 306, 308, 310, 312, 314, 316, 318, 320, 322, 324, 326, 328, 330, 332, 334, 336, 338, 340, 342, 344, 346, 348, 350, 352, 354, 356, 358, 360, 362, 364, 366, 368, 370, 372, 374, 376, 378, 380, 382, 384, 386, 388, 390, 392, 394, 396, 398, 400, 402, 404, 406, 408, 410, 412, 414, 416, 418, 420, 422, 424, 426, 428, 430, 432, 434, 436, 438, 440, 442, 444, 446, 448, 450, 452, or 454.

[0069] In some embodiments, the antibody or antigen-binding fragment thereof comprising:
[0070] a heavy chain variable region having an amino acid sequence with at least 75% (e.g., 75%, 80%, 85%, 90%, 95%, 96%, 97%, 98%, 99%, 100%) identity to SEQ ID NO: 1, 3, 5, 7, 9, 11, 13, 15, 17, 19, 21, 23, 25, 27, 29, 31, 33, 35, 37, 39, 41, 43, 45, 47, 49, 51, 53, 55, 57, 59, 61, 63, 65, 67, 69, 71, 73, 75, 77, 79, 81, 83, 85, 87, 89, 91, 93, 95, 97, 99, 101, 103, 105, 107, 109, 111, 113, 115, 117, 119, 121, 123, 125, 127, 129, 131, 133, 135, 137, 139, 141, 143, 145, 147, 149, 151, 153, 155, 157, 159, 161, 163, 165, 167, 169, 171, 173, 175, 177, 179, 181, 183, 185, 187, 189, 191, 193, 195, 197, 199, 201, 203, 205, 207, 209, 211, 213, 215, 217, 219, 221, 223, 225, 227, 229, 231, 233, 235, 237, 239, 241, 243, 245, 247, 249, 251, 253, 255, 257, 259, 261, 263, 265, 267, 269, 271, 273, 275, 277, 279, 281, 283, 285, 287, 289, 291, 293, 295, 297, 299, 301, 303, 305, 307, 309, 311, 313, 315, 317, 319, 321, 323, 325, 327, 329, 331, 333, 335, 337, 339, 341, 343, 345, 347, 349, 351, 353, 355, 357, 359, 361, 363, 365, 367, 369, 371, 373, 375, 377, 379, 381, 383, 385, 387, 389, 391, 393, 395, 397, 399, 401, 403, 405, 407, 409, 411, 413, 415, 417, 419, 421, 423, 425, 427, 429, 431, 433, 435, 437, 439, 441, 443, 445, 447, 449, 451, or 453; and
[0071] a light chain variable region having an amino acid sequence with at least 75% (e.g., 75%, 80%, 85%, 90%, 95%, 96%, 97%, 98%, 99%, 100%) identity to SEQ ID NO: 2, 4, 6, 8, 10, 12, 14, 16, 18, 20, 22, 24, 26, 28, 30, 32, 34, 36, 38, 40, 42, 44, 46, 48, 50, 52, 54, 56, 58, 60, 62, 64, 66, 68, 70, 72, 74, 76, 78, 80, 82, 84, 86, 88, 90, 92, 94, 96, 98, 100, 102, 104, 106, 108, 110, 112, 114, 116, 118, 120, 122, 124, 126, 128, 130, 132, 134, 136, 138, 140, 142, 144, 146, 148, 150, 152, 154, 156, 158, 160, 162, 164, 166, 168, 170, 172, 174, 176, 178, 180, 182, 184, 186, 188, 190, 192, 194, 196, 198, 200, 202, 204, 206, 208, 210, 212, 214, 216, 218, 220, 222, 224, 226, 228, 230, 232, 234, 236, 238, 240, 242, 244, 246, 248, 250, 252, 254, 256, 258, 260, 262, 264, 266, 268, 270, 272, 274, 276, 278, 280, 282, 284, 286, 288, 290, 292, 294, 296, 298, 300, 302, 304, 306, 308, 310, 312, 314, 316, 318, 320, 322, 324, 326, 328, 330, 332, 334, 336, 338, 340, 342, 344, 346, 348, 350, 352, 354, 356, 358, 360, 362, 364, 366, 368, 370, 372, 374, 376, 378, 380, 382, 384, 386, 388, 390, 392, 394, 396, 398, 400, 402, 404, 406, 408, 410, 412, 414, 416, 418, 420, 422, 424, 426, 428, 430, 432, 434, 436, 438, 440, 442, 444, 446, 448, 450, 452, or 454.

[0072] In some embodiments, the antibody or antigen-binding fragment thereof of comprising:
[0073] a heavy chain variable region having the amino acid sequence of SEQ ID NO: 1, 3, 5, 7, 9, 11, 13, 15, 17, 19, 21, 23, 25, 27, 29, 31, 33, 35, 37, 39, 41, 43, 45, 47, 49, 51, 53, 55, 57, 59, 61, 63, 65, 67, 69, 71, 73, 75, 77, 79, 81, 83, 85, 87, 89, 91, 93, 95, 97, 99, 101, 103, 105, 107, 109, 111, 113, 115, 117, 119, 121, 123, 125, 127, 129, 131, 133, 135, 137, 139, 141, 143, 145, 147, 149, 151, 153, 155, 157, 159, 161, 163, 165, 167, 169, 171, 173, 175, 177, 179, 181, 183, 185, 187, 189, 191, 193, 195, 197, 199, 201, 203, 205, 207, 209, 211, 213, 215, 217, 219, 221, 223, 225, 227, 229, 231, 233, 235, 237, 239, 241, 243, 245, 247, 249, 251, 253, 255, 257, 259, 261, 263, 265, 267, 269, 271, 273, 275, 277, 279, 281, 283, 285, 287, 289, 291, 293, 295, 297, 299, 301, 303, 305, 307, 309, 311, 313, 315, 317, 319, 321, 323, 325, 327, 329, 331, 333, 335, 337, 339, 341, 343, 345, 347, 349, 351, 353, 355, 357, 359, 361, 363, 365, 367, 369, 371, 373, 375, 377, 379, 381, 383, 385, 387, 389, 391, 393, 395, 397, 399, 401, 403, 405, 407, 409, 411, 413, 415, 417, 419, 421, 423, 425, 427, 429, 431, 433, 435, 437, 439, 441, 443, 445, 447, 449, 451, or 453; and
[0074] a light chain variable region having the amino acid sequence of SEQ ID NO: 2, 4, 6, 8, 10, 12, 14, 16, 18, 20, 22, 24, 26, 28, 30, 32, 34, 36, 38, 40, 42, 44, 46, 48, 50, 52, 54, 56, 58, 60, 62, 64, 66, 68, 70, 72, 74, 76, 78, 80, 82, 84, 86, 88, 90, 92, 94, 96, 98, 100, 102, 104, 106, 108, 110, 112, 114, 116, 118, 120, 122, 124, 126, 128, 130, 132, 134, 136, 138, 140, 142, 144, 146, 148, 150, 152, 154, 156, 158, 160, 162, 164, 166, 168, 170, 172, 174, 176, 178, 180, 182, 184, 186, 188, 190, 192, 194, 196, 198, 200, 202, 204, 206, 208, 210, 212, 214, 216, 218, 220, 222, 224, 226, 228, 230, 232, 234, 236, 238, 240, 242, 244, 246, 248, 250, 252, 254, 256, 258, 260, 262, 264, 266, 268, 270, 272, 274, 276, 278, 280, 282, 284, 286, 288, 290, 292, 294, 296, 298, 300, 302, 304, 306, 308, 310, 312, 314, 316, 318, 320, 322, 324, 326, 328, 330, 332, 334, 336, 338, 340, 342, 344, 346, 348, 350, 352, 354, 356, 358, 360, 362, 364, 366, 368, 370, 372, 374, 376, 378, 380, 382, 384, 386, 388, 390, 392, 394, 396, 398, 400, 402, 404, 406, 408, 410, 412, 414, 416, 418, 420, 422, 424, 426, 428, 430, 432, 434, 436, 438, 440, 442, 444, 446, 448, 450, 452, or 454.

[0075] The antibody or antigen-binding fragment thereof comprising: a heavy chain variable region and a light chain variable region comprise the respective amino acid sequences of SEQ ID NOs: 1-2, 3-4, 5-6, 7-8, 9-10, 11-12, 13-14, 15-16, 17-18, 19-20, 21-22, 23-24, 25-26, 27-28, 29-30, 31-32, 33-34, 35-36, 37-38, 39-40, 41-42, 43-44, 45-46, 47-48, 49-50, 51-52, 53-54, 55-56, 57-58, 59-60, 61-62, 63-64, 65-66, 67-68, 69-70, 71-72, 73-74, 75-76, 77-78, 79-80, 81-82, 83-84, 85-86, 87-88, 89-90, 91-92, 93-94, 95-96, 97-98, 99-100, 101-102, 103-104, 105-106, 107-108, 109-110, 111-112, 113-114, 115-116, 117-118, 119-120, 121-122, 123-124, 125-126, 127-128, 129-130, 131-132, 133-134, 135-136, 137-138, 139-140, 141-142, 143-144, 145-146, 147-148, 149-150, 151-152, 153-154, 155-156, 157-158, 159-160, 161-162, 163-164, 165-166, 167-168, 169-170, 171-172, 173-174, 175-176, 177-178, 179-180, 181-182, 183-184, 185-186, 187-188, 189-190, 191-192, 193-194, 195-196, 197-198, 199-200, 201-202, 203-204, 205-206, 207-208, 209-210, 211-212, 213-214, 215-216, 217-218, 219-220, 221-222, 223-224, 225-226, 227-228, 229-230, 231-232, 233-234, 235-236, 237-238, 239-240, 241-242, 243-244, 245-246, 247-248, 249-250, 251-252, 253-254, 255-256, 257-258, 259-260, 261-262, 263-264, 265-266, 267-268, 269-270, 271-272, 273-274, 275-276, 277-278, 279-280, 281-282, 283-284, 285-286, 287-288, 289-290, 291-292, 293-294, 295-296, 297-298, 299-300, 301-302, 303-304, 305-306, 307-308, 309-310, 311-312, 313-314, 315-316, 317-318, 319-320, 321-322, 323-324, 325-326, 327-328, 329-330, 331-332, 333-334, 335-336, 337-338, 339-340, 341-342, 343-344, 345-346, 347-348, 349-350, 351-352, 353-354, 355-356, 357-358, 359-360, 361-362, 363-364, 365-366, 367-368, 369-370, 371-372, 373-374, 375-376, 377-378, 379-380, 381-382, 383-384, 385-386, 387-388, 389-390, 391-392, 393-394, 395-396, 397-398, 399-400, 401-402, 403-404, 405-406, 407-408, 409-410, 411-412, 413-414, 415-416, 417-418, 419-420, 421-422, 423-424, 425-426, 427-428, 429-430, 431-432, 433-434, 435-436, 437-438, 439-440, 441-442, 443-444, 445-446, 447-448, 449-450, 451-452, or 453-454.

[0076] In some embodiments, the antibody or antigen-binding fragment thereof comprises (a) a first target binding site that specifically binds to an epitope within the S polypeptide, and (b) a second target binding site that binds to a different epitope on the S polypeptide or on a different molecule. In some embodiments, the multivalent antibody is a bivalent or bispecific antibody.

[0077] In some embodiments, the antibody or the antigen-binding fragment thereof further comprises a variant Fc region (e.g., a variant Fc region containing M428L and N434S substitutions according to the EU numbering). In some embodiments, the antibody is a monoclonal antibody. In some embodiments, the antibody is a chimeric antibody, a humanized antibody, or a humanized monoclonal antibody. In some embodiments, the antibody is a single-chain antibody, a Fab or a Fab2 fragment.

[0078] In some embodiments, the antibody or antigen-binding fragment thereof can be detectably labeled or conjugated to a toxin, a therapeutic agent, a polymer (e.g., polyethylene glycol (PEG)), a receptor, an enzyme or a receptor ligand. For example, an antibody of the present disclosure may be coupled to a toxin (e.g., a tetanus toxin). Such antibodies may be used to treat animals, including humans, that are infected with the virus that is etiologically linked to SARS-COV-2. The toxin-coupled antibody is thought to bind to a portion of a spike protein presented on an infected cell, and then kill the infected cell.

[0079] In another example, an antibody of the present disclosure may be coupled to a detectable tag. Such antibodies may be used within diagnostic assays to determine if an animal, such as a human, is infected with SARS-COV-2. Examples of detectable tags include: fluorescent proteins (i.e., green fluorescent protein, red fluorescent protein, yellow fluorescent protein), fluorescent markers (i.e., fluorescein isothiocyanate, rhodamine, texas red), radiolabels (i.e., 3H, 32P, 1251), enzymes (i.e., ß-galactosidase, horseradish peroxidase, ß-glucuronidase, alkaline phosphatase), or an affinity tag (i.e., avidin, biotin, streptavidin). Methods to couple antibodies to a detectable tag are known in the art. Harlow et al., Antibodies: A Laboratory Manual, page 319 (Cold Spring Harbor Pub. 1988).

b. Fragment

[0080] In some embodiments, an antibody provided herein is an antibody fragment. Antibody fragments include, but are not limited to, Fab, Fab′, Fab′-SH, F(ab′)2, Fv, and single-chain Fv (scFv) fragments, and other fragments described below, e.g., diabodies, triabodies tetrabodies, and single-domain antibodies. For a review of certain antibody fragments, see Hudson et al., Nat. Med. 9:129-134 (2003). For a review of scFv fragments, see, e.g., Pluckthun, in The Pharmacology of Monoclonal Antibodies, vol. 113, Rosenburg and Moore eds., (Springer-Verlag, New York), pp. 269-315 (1994); see also WO 93/16185; and U.S. Pat. Nos. 5,571,894 and 5,587,458. For discussion of Fab and F(ab′)2 fragments comprising salvage receptor binding epitope residues and having increased in vivo half-life, see U.S. Pat. No. 5,869,046.

[0081] Diabodies are antibody fragments with two antigen-binding sites that may be bivalent or bispecific. See, for example, EP 404,097; WO 1993/01161; Hudson et al., Nat. Med. 9:129-134 (2003); and Hollinger et al., Proc. Natl. Acad. Sci. USA 90: 6444-6448 (1993). Triabodies and tetrabodies are also described in Hudson et al., Nat. Med. 9:129-134 (2003).

[0082] Single-domain antibodies are antibody fragments comprising all or a portion of the heavy chain variable domain or all or a portion of the light chain variable domain of an antibody. In some embodiments, a single-domain antibody is a human single-domain antibody (DOMANTIS, Inc., Waltham, Mass.; see, e.g., U.S. Pat. No. 6,248,516).

[0083] Antibody fragments can be made by various techniques, including but not limited to proteolytic digestion of an intact antibody as well as production by recombinant host cells (e.g., E. coli or phage), as described herein.

c. Chimeric and Humanized Antibodies

[0084] In some embodiments, an antibody provided herein is a chimeric antibody. Certain chimeric antibodies are described, e.g., in U.S. Pat. No. 4,816,567; and Morrison et al., Proc. Natl. Acad. Sci. USA, 81:6851-6855 (1984)). In one example, a chimeric antibody comprises a non-human variable region (e.g., a variable region derived from a mouse, rat, hamster, rabbit, or non-human primate, such as a monkey) and a human constant region. In a further example, a chimeric antibody is a “class switched” antibody in which the class or subclass has been changed from that of the parent antibody. Chimeric antibodies include antigen-binding fragments thereof.

[0085] In some embodiments, a chimeric antibody is a humanized antibody. Typically, a non-human antibody is humanized to reduce immunogenicity to humans, while retaining the specificity and affinity of the parental non-human antibody. Generally, a humanized antibody comprises one or more variable domains in which HVRs, e.g., CDRs, (or portions thereof) are derived from a non-human antibody, and FRs (or portions thereof) are derived from human antibody sequences. A humanized antibody optionally will also comprise at least a portion of a human constant region. In some embodiments, some FR residues in a humanized antibody are substituted with corresponding residues from a non-human antibody (e.g., the antibody from which the HVR residues are derived), e.g., to restore or improve antibody specificity or affinity.

[0086] Humanized antibodies and methods of making them are reviewed, e.g., in Almagro and Fransson, Front. Biosci. 13:1619-1633 (2008), and are further described, e.g., in Riechmann et al., Nature 332:323-329 (1988); Queen et al., Proc. Nat'l Acad. Sci. USA 86:10029-10033 (1989); U.S. Pat. Nos. 5,821,337, 7,527,791, 6,982,321, and 7,087,409; Kashmiri et al., Methods 36:25-34 (2005) (describing specificity determining region (SDR) grafting); Padlan, Mol. Immunol. 28:489-498 (1991) (describing “resurfacing”); Dall'Acqua et al., Methods 36:43-60 (2005) (describing “FR shuffling”); and Osbourn et al., Methods 36:61-68 (2005) and Klimka et al., Br. J. Cancer, 83:252-260 (2000) (describing the “guided selection” approach to FR shuffling).

[0087] Human framework regions that may be used for humanization include but are not limited to: framework regions selected using the “best-fit” method (see, e.g., Sims et al. J. Immunol. 151:2296 (1993)); framework regions derived from the consensus sequence of human antibodies of a particular subgroup of light or heavy chain variable regions (see, e.g., Carter et al. Proc. Natl. Acad. Sci. USA, 89:4285 (1992); and Presta et al. J. Immunol., 151:2623 (1993)); human mature (somatically mutated) framework regions or human germline framework regions (see, e.g., Almagro and Fransson, Front. Biosci. 13:1619-1633 (2008)); and framework regions derived from screening FR libraries (see, e.g., Baca et al., J. Biol. Chem. 272:10678-10684 (1997) and Rosok et al., J. Biol. Chem. 271:22611-22618 (1996)).

d. Human Antibodies

[0088] In some embodiments, an antibody provided herein is a human antibody. Human antibodies can be produced using various techniques known in the art or using techniques described herein. Human antibodies are described generally in van Dijk and van de Winkel, Curr. Opin. Pharmacol. 5: 368-74 (2001) and Lonberg, Curr. Opin. Immunol. 20:450-459 (2008).

[0089] Human antibodies may be prepared by administering an immunogen to a transgenic animal that has been modified to produce intact human antibodies or intact antibodies with human variable regions in response to antigenic challenge. Such animals typically contain all or a portion of the human immunoglobulin loci, which replace the endogenous immunoglobulin loci, or which are present extrachromosomally or integrated randomly into the animal's chromosomes. In such transgenic mice, the endogenous immunoglobulin loci have generally been inactivated. For review of methods for obtaining human antibodies from transgenic animals, see Lonberg, Nat. Biotech. 23:1117-1125 (2005). See also, e.g., U.S. Pat. Nos. 6,075,181 and 6,150,584 describing XENOMOUSE technology; U.S. Pat. No. 5,770,429 describing HUMAB technology; U.S. Pat. No. 7,041,870 describing K-M MOUSE technology, and U.S. Patent Application Publication No. US 2007/0061900, describing VELOCIMOUSE technology). Human variable regions from intact antibodies generated by such animals may be further modified, e.g., by combining with a different human constant region.

[0090] Human antibodies can also be made by hybridoma-based methods. Human myeloma and mouse-human heteromyeloma cell lines for the production of human monoclonal antibodies have been described. (See, e.g., Kozbor J. Immunol., 133: 3001 (1984); Brodeur et al., Monoclonal Antibody Production Techniques and Applications, pp. 51-63 (Marcel Dekker, Inc., New York, 1987); and Boerner et al., J. Immunol., 147: 86 (1991).) Human antibodies generated via human B-cell hybridoma technology are also described in Li et al., Proc. Natl. Acad. Sci. USA, 103:3557-3562 (2006). Additional methods include those described, for example, in U.S. Pat. No. 7,189,826 (describing production of monoclonal human IgM antibodies from hybridoma cell lines) and Ni, Xiandai Mianyixue, 26(4):265-268 (2006) (describing human-human hybridomas). Human hybridoma technology (Trioma technology) is also described in Vollmers and Brandlein, Histology and Histopathology, 20(3):927-937 (2005) and Vollmers and Brandlein, Methods and Findings in Experimental and Clinical Pharmacology, 27(3): 185-91 (2005).

[0091] Human antibodies may also be generated by isolating Fv clone variable domain sequences selected from human-derived phage display libraries. Such variable domain sequences may then be combined with a desired human constant domain. Techniques for selecting human antibodies from antibody libraries are described below.

[0092] Antibodies of the disclosure may be isolated by screening combinatorial libraries for antibodies with the desired activity or activities. For example, a variety of methods are known in the art for generating phage display libraries and screening such libraries for antibodies possessing the desired binding characteristics. Such methods are reviewed, e.g., in Hoogenboom et al., in Methods in Molecular Biology 178:1-37 (O'Brien et al., ed., Human Press, Totowa, N.J., 2001) and further described, e.g., in the McCafferty et al., Nature 348:552-554; Clackson et al., Nature 352: 624-628 (1991); Marks et al., J. Mol. Biol. 222: 581-597 (1992); Marks and Bradbury, in Methods in Molecular Biology 248:161-175 (Lo, ed., Human Press, Totowa, N.J., 2003); Sidhu et al., J. Mol. Biol. 338(2): 299-310 (2004); Lee et al., J. Mol. Biol. 340(5): 1073-1093 (2004); Fellouse, Proc. Natl. Acad. Sci. USA 101(34): 12467-12472 (2004); and Lee et al., J. Immunol. Methods 284(1-2): 119-132 (2004).

[0093] In certain phage display methods, repertoires of VH and VL genes are separately cloned by polymerase chain reaction (PCR) and recombined randomly in phage libraries, which can then be screened for antigen-binding phage as described in Winter et al., Ann. Rev. Immunol., 12: 433-455 (1994). Phage typically display antibody fragments, either as scFv fragments or as Fab fragments. Libraries from immunized sources provide high-affinity antibodies to the immunogen without the requirement of constructing hybridomas. Alternatively, the naive repertoire can be cloned (e.g., from human) to provide a single source of antibodies to a wide range of non-self and also self-antigens without any immunization as described by Griffiths et al., EMBO J, 12: 725-734 (1993). Finally, naive libraries can also be made synthetically by cloning unrearranged V-gene segments from stem cells and using PCR primers containing random sequence to encode the highly variable CDR3 regions and to accomplish rearrangement in vitro, as described by Hoogenboom and Winter, J. Mol. Biol., 227: 381-388 (1992). Patent publications describing human antibody phage libraries include, for example, U.S. Pat. No. 5,750,373, and US Patent Publication Nos. 2005/0079574, 2005/0119455, 2005/0266000, 2007/0117126, 2007/0160598, 2007/0237764, 2007/0292936, and 2009/0002360. Antibodies or antibody fragments isolated from human antibody libraries are considered human antibodies or human antibody fragments herein.

e. Variants

[0094] In some embodiments, amino acid sequence variants of the antibodies provided herein are contemplated. For example, it may be desirable to improve the binding affinity and/or other biological properties of the antibody. Amino acid sequence variants of an antibody may be prepared by introducing appropriate modifications into the nucleotide sequence encoding the antibody, or by peptide synthesis. Such modifications include, for example, deletions from, and/or insertions into and/or substitutions of residues within the amino acid sequences of the antibody. Any combination of deletion, insertion, and substitution can be made to arrive at the final construct, provided that the final construct possesses the desired characteristics, e.g., antigen binding.

### Substitution, Insertion, and Deletion Variants

[0095] In some embodiments, antibody variants having one or more amino acid substitutions are provided. Sites of interest for substitutional mutagenesis include the HVRs and FRs. Conservative substitutions are defined herein. Amino acid substitutions may be introduced into an antibody of interest and the products screened for a desired activity, e.g., retained/improved antigen binding, decreased immunogenicity, or improved antibody-dependent cell-mediated cytotoxicity (ADCC) and complement-dependent cytotoxicity (CDC).

[0096] Accordingly, an antibody of the disclosure can comprise one or more conservative modifications of the CDRs, heavy chain variable region, or light variable regions described herein. A conservative modification or functional equivalent of a peptide, polypeptide, or protein disclosed in this disclosure refers to a polypeptide derivative of the peptide, polypeptide, or protein, e.g., a protein having one or more point mutations, insertions, deletions, truncations, a fusion protein, or a combination thereof. It substantially retains the activity of the parent peptide, polypeptide, or protein (such as those disclosed in this disclosure). In general, a conservative modification or functional equivalent is at least 60% (e.g., any number between 60% and 100%, inclusive, e.g., 60%, 70%, 75%, 80%, 85%, 90%, 95%, 96%, 97%, 98%, and 99%) identical to a parent. Accordingly, within the scope of this disclosure are heavy chain variable region or light variable regions having one or more point mutations, insertions, deletions, truncations, a fusion protein, or a combination thereof, as well as antibodies having the variant regions.

[0097] As used herein, the percent homology between two amino acid sequences is equivalent to the percent identity between the two sequences. The percent identity between the two sequences is a function of the number of identical positions shared by the sequences (i.e., % homology=# of identical positions/total # of positions×100), taking into account the number of gaps, and the length of each gap, which need to be introduced for optimal alignment of the two sequences. The comparison of sequences and determination of percent identity between two sequences can be accomplished using a mathematical algorithm, as described in the non-limiting examples below.

[0098] The percent identity between two amino acid sequences can be determined using the algorithm of E. Meyers and W. Miller (Comput. Appl. Biosci., 4:11-17 (1988)) which has been incorporated into the ALIGN program (version 2.0), using a PAM120 weight residue table, a gap length penalty of 12 and a gap penalty of 4. In addition, the percent identity between two amino acid sequences can be determined using the Needleman and Wunsch (J. Mol. Biol. 48:444-453 (1970)) algorithm which has been incorporated into the GAP program in the GCG software package (available at www.gcg.com), using either a Blossum 62 matrix or a PAM250 matrix, and a gap weight of 16, 14, 12, 10, 8, 6, or 4 and a length weight of 1, 2, 3, 4, 5, or 6.

[0099] Additionally or alternatively, the protein sequences of the present disclosure can further be used as a “query sequence” to perform a search against public databases to, for example, identify related sequences. Such searches can be performed using the XBLAST program (version 2.0) of Altschul, et al. (1990) J. Mol. Biol. 215:403-10. BLAST protein searches can be performed with the XBLAST program, score=50, wordlength=3 to obtain amino acid sequences homologous to the antibody molecules of this disclosure. To obtain gapped alignments for comparison purposes, Gapped BLAST can be utilized as described in Altschul et al., (1997) Nucleic Acids Res. 25(17):3389-3402. When utilizing BLAST and Gapped BLAST programs, the default parameters of the respective programs (e.g., XBLAST and NBLAST) can be used. (See www.ncbi.nlm.nih.gov).

[0100] As used herein, the term “conservative modifications” refers to amino acid modifications that do not significantly affect or alter the binding characteristics of the antibody containing the amino acid sequence. Such conservative modifications include amino acid substitutions, additions and deletions. Modifications can be introduced into an antibody of this disclosure by standard techniques known in the art, such as site-directed mutagenesis and PCR-mediated mutagenesis. Conservative amino acid substitutions are ones in which the amino acid residue is replaced with an amino acid residue having a similar side chain. Families of amino acid residues having similar side chains have been defined in the art. These families include: (i) amino acids with basic side chains (e.g., lysine, arginine, histidine), (ii) acidic side chains (e.g., aspartic acid, glutamic acid), (iii) uncharged polar side chains (e.g., glycine, asparagine, glutamine, serine, threonine, tyrosine, cysteine, tryptophan), (iv) nonpolar side chains (e.g., alanine, valine, leucine, isoleucine, proline, phenylalanine, methionine), (v) beta-branched side chains (e.g., threonine, valine, isoleucine), and (vi) aromatic side chains (e.g., tyrosine, phenylalanine, tryptophan, histidine).

[0101] Non-conservative substitutions will entail exchanging a member of one of these classes for another class.

[0102] An exemplary substitutional variant is an affinity matured antibody, which may be conveniently generated, e.g., using phage display-based affinity maturation techniques such as those described in, e.g., Hoogenboom et al., in Methods in Molecular Biology 178:1-37 (O'Brien et al., ed., Human Press, Totowa, N.J., (2001). Amino acid sequence insertions include amino- and/or carboxyl-terminal fusions ranging in length from one residue to polypeptides containing a hundred or more residues, as well as intrasequence insertions of single or multiple amino acid residues. Examples of terminal insertions include an antibody with an N-terminal methionyl residue. Other insertional variants of the antibody molecule include the fusion to the N- or C-terminus of the antibody to an enzyme (e.g., for ADEPT) or a polypeptide which increases the serum half-life of the antibody.

### Glycosylation Variants

[0103] In some embodiments, an antibody provided herein is altered to increase or decrease the extent to which the antibody is glycosylated. Addition or deletion of glycosylation sites to an antibody may be conveniently accomplished by altering the amino acid sequence such that one or more glycosylation sites are created or removed.

[0104] For example, an aglycoslated antibody can be made (i.e., the antibody lacks glycosylation). Glycosylation can be altered to, for example, increase the affinity of the antibody for antigen. Such carbohydrate modifications can be accomplished by, for example, altering one or more sites of glycosylation within the antibody sequence. For example, one or more amino acid substitutions can be made that result in elimination of one or more variable region framework glycosylation sites to thereby eliminate glycosylation at that site. Such aglycosylation may increase the affinity of the antibody for antigen. Such an approach is described in further detail in U.S. Pat. Nos. 5,714,350 and 6,350,861 by Co et al.

[0105] Glycosylation of the constant region on N297 may be prevented by mutating the N297 residue to another residue, e.g., N297A, and/or by mutating an adjacent amino acid, e.g., 298 to thereby reduce glycosylation on N297.

[0106] Additionally or alternatively, an antibody can be made that has an altered type of glycosylation, such as a hypofucosylated antibody having reduced amounts of fucosyl residues or an antibody having increased bisecting GlcNac structures. Such altered glycosylation patterns have been demonstrated to increase the ADCC ability of antibodies. Such carbohydrate modifications can be accomplished by, for example, expressing the antibody in a host cell with altered glycosylation machinery. Cells with altered glycosylation machinery have been described in the art and can be used as host cells in which to express recombinant antibodies described herein to thereby produce an antibody with altered glycosylation. For example, EP 1,176, 195 by Hanai et al. describes a cell line with a functionally disrupted FUT8 gene, which encodes a fucosyltransferase, such that antibodies expressed in such a cell line exhibit hypofucosylation. PCT Publication WO 03/035835 by Presta describes a variant Chinese Hamster Ovary cell line, Led 3 cells, with reduced ability to attach fucose to Asn(297)-linked carbohydrates, also resulting in hypofucosylation of antibodies expressed in that host cell (see also Shields, R. L. et al. (2002) J. Biol. Chem. 277:26733-26740). PCT Publication WO 99/54342 by Umana et al. describes cell lines engineered to express glycoprotein-modifying glycosyltransferases (e.g., beta(1,4)-N-acetylglucosaminyltransferase III (GnTIII)) such that antibodies expressed in the engineered cell lines exhibit increased bisecting GlcNac structures which result in increased ADCC activity of the antibodies (see also Umana et al. (1999) Nat. Biotech. 17: 176-180).

### Fc Region Variants

[0107] The variable regions of the antibody described herein can be linked (e.g., covalently linked or fused) to an Fc, e.g., an IgGl, IgG2, IgG3 or IgG4 Fc, which may be of any allotype or isoallotype, e.g., for IgGl: Glm, Glml(a), Glm2(x), Glm3(f), Glml7(z); for IgG2: G2m, G2m23(n); for IgG3: G3m, G3m21(gl), G3m28(g5), G3 ml 1(b0), G3m5(bl), G3ml3(b3), G3ml4(b4), G3ml0(b5), G3ml5(s), G3ml6(t), G3m6(c3), G3m24(c5), G3m26(u), G3m27(v); and for K: Km, Kml, Km2, Km3 (see, e.g., Jefferies et al. (2009) mAbs 1:1). In some embodiments, the antibodies variable regions described herein are linked to an Fc that binds to one or more activating Fc receptors (FcγI, FcγIIa or FcγIIIa), and thereby stimulate ADCC and may cause T cell depletion. In some embodiments, the antibody variable regions described herein are linked to an Fc that causes depletion.

[0108] In some embodiments, the antibody variable regions described herein may be linked to an Fc comprising one or more modifications, typically to alter one or more functional properties of the antibody, such as serum half-life, complement fixation, Fc receptor binding, and/or antigen-dependent cellular cytotoxicity. Furthermore, an antibody described herein may be chemically modified (e.g., one or more chemical moieties can be attached to the antibody) or be modified to alter its glycosylation, to alter one or more functional properties of the antibody. The numbering of residues in the Fc region is that of the EU index of Kabat.

[0109] The Fc region encompasses domains derived from the constant region of an immunoglobulin, preferably a human immunoglobulin, including a fragment, analog, variant, mutant or derivative of the constant region. Suitable immunoglobulins include IgGl, IgG2, IgG3, IgG4, and other classes such as IgA, IgD, IgE and IgM. The constant region of an immunoglobulin is defined as a naturally-occurring or synthetically-produced polypeptide homologous to the immunoglobulin C-terminal region, and can include a CH1 domain, a hinge, a CH2 domain, a CH3 domain, or a CH4 domain, separately or in combination. In some embodiments, an antibody of this disclosure has an Fc region other than that of a wild type IgA1. The antibody can have an Fc region from that of IgG (e.g., IgG1, IgG2, IgG3, and IgG4) or other classes such as IgA2, IgD, IgE, and IgM. The Fc can be a mutant form of IgA1.

[0110] The constant region of an immunoglobulin is responsible for many important antibody functions, including Fc receptor (FcR) binding and complement fixation. There are five major classes of heavy chain constant region, classified as IgA, IgG, IgD, IgE, IgM, each with characteristic effector functions designated by isotype. For example, IgG is separated into four subclasses known as IgGl, IgG2, IgG3, and IgG4.

[0111] Ig molecules interact with multiple classes of cellular receptors. For example, IgG molecules interact with three classes of Fcγ receptors (FcγR) specific for the IgG class of antibody, namely FcγRI, FcγRII, and FcγRIIL. The important sequences for the binding of IgG to the FcγR receptors have been reported to be located in the CH2 and CH3 domains. The serum half-life of an antibody is influenced by the ability of that antibody to bind to an FcR.

[0112] In some embodiments, the Fc region is a variant Fc region, e.g., an Fc sequence that has been modified (e.g., by amino acid substitution, deletion and/or insertion) relative to a parent Fc sequence (e.g., an unmodified Fc polypeptide that is subsequently modified to generate a variant), to provide desirable structural features and/or biological activity. For example, one may make modifications in the Fc region in order to generate an Fc variant that (a) has increased or decreased ADCC, (b) increased or decreased CDC, (c) has increased or decreased affinity for Clq and/or (d) has increased or decreased affinity for an Fc receptor relative to the parent Fc. Such Fc region variants will generally comprise at least one amino acid modification in the Fc region. Combining amino acid modifications is thought to be particularly desirable. For example, the variant Fc region may include two, three, four, five, etc. substitutions therein, e.g., of the specific Fc region positions identified herein.

[0113] A variant Fc region may also comprise a sequence alteration wherein amino acids involved in disulfide bond formation are removed or replaced with other amino acids. Such removal may avoid reaction with other cysteine-containing proteins present in the host cell used to produce the antibodies described herein. Even when cysteine residues are removed, single chain Fc domains can still form a dimeric Fc domain that is held together non-covalently. In other embodiments, the Fc region may be modified to make it more compatible with a selected host cell. For example, one may remove the PA sequence near the N-terminus of a typical native Fc region, which may be recognized by a digestive enzyme in E. coli such as proline iminopeptidase. In other embodiments, one or more glycosylation sites within the Fc domain may be removed. Residues that are typically glycosylated (e.g., asparagine) may confer cytolytic response. Such residues may be deleted or substituted with unglycosylated residues (e.g., alanine). In other embodiments, sites involved in interaction with complement, such as the Clq binding site, may be removed from the Fc region. For example, one may delete or substitute the EKK sequence of human IgGl. In some embodiments, sites that affect binding to Fc receptors may be removed, preferably sites other than salvage receptor binding sites. In other embodiments, an Fc region may be modified to remove an ADCC site. ADCC sites are known in the art; see, for example, Molec. Immunol. 29 (5): 633-9 (1992) with regard to ADCC sites in IgGl. Specific examples of variant Fc domains are disclosed, for example, in WO 97/34631 and WO 96/32478.

[0114] In one embodiment, the hinge region of Fc is modified such that the number of cysteine residues in the hinge region is altered, e.g., increased or decreased. This approach is described further in U.S. Pat. No. 5,677,425 by Bodmer et al. The number of cysteine residues in the hinge region of Fc is altered to, for example, facilitate assembly of the light and heavy chains or to increase or decrease the stability of the antibody. In one embodiment, the Fc hinge region of an antibody is mutated to decrease the biological half-life of the antibody. More specifically, one or more amino acid mutations are introduced into the CH2-CH3 domain interface region of the Fc-hinge fragment such that the antibody has impaired Staphylococcal protein A (SpA) binding relative to native Fc-hinge domain SpA binding. This approach is described in further detail in U.S. Pat. No. 6,165,745 by Ward et al.

[0115] In yet other embodiments, the Fc region is altered by replacing at least one amino acid residue with a different amino acid residue to alter the effector function(s) of the antibody. For example, one or more amino acids selected from amino acid residues 234, 235, 236, 237, 297, 318, 320 and 322 can be replaced with a different amino acid residue such that the antibody has an altered affinity for an effector ligand but retains the antigen-binding ability of the parent antibody. The effector ligand to which affinity is altered can be, for example, an Fc receptor or the CI component of complement. This approach is described in further detail in U.S. Pat. Nos. 5,624,821 and 5,648,260, both by Winter et al.

[0116] In another example, one or more amino acids selected from amino acid residues 329, 331 and 322 can be replaced with a different amino acid residue such that the antibody has altered Clq binding and/or reduced or abolished CDC. This approach is described in further detail in U.S. Pat. No. 6,194,551 by Idusogie et al.

[0117] In another example, one or more amino acid residues within amino acid positions 231 and 239 are altered to thereby alter the ability of the antibody to fix complement. This approach is described further in PCT Publication WO 94/29351 by Bodmer et al.

[0118] In yet another example, the Fc region may be modified to increase ADCC and/or to increase the affinity for an Fcγ receptor by modifying one or more amino acids at the following positions: 234, 235, 236, 238, 239, 240, 241, 243, 244, 245, 247, 248, 249, 252, 254, 255, 256, 258, 262, 263, 264, 265, 267, 268, 269, 270, 272, 276, 278, 280, 283, 285, 286, 289, 290, 292, 293, 294, 295, 296, 298, 299, 301, 303, 305, 307, 309, 312, 313, 315, 320, 322, 324, 325, 326, 327, 329, 330, 331, 332, 333, 334, 335, 337, 338, 340, 360, 373, 376, 378, 382, 388, 389, 398, 414, 416, 419, 430, 433, 434, 435, 436, 437, 438 or 439. Exemplary substitutions include 236A, 239D, 239E, 268D, 267E, 268E, 268F, 324T, 332D, and 332E. Exemplary variants include 239D/332E, 236A/332E, 236A/239D/332E, 268F/324T, 267E/268F, 267E/324T, and 267E/268F7324T. Other modifications for enhancing FcγR and complement interactions include but are not limited to substitutions 298A, 333A, 334A, 326A, 2471, 339D, 339Q, 280H, 290S, 298D, 298V, 243L, 292P, 300L, 396L, 305I, and 396L. These and other modifications are reviewed in Strohl, 2009, Current Opinion in Biotechnology 20:685-691.

[0119] Fc modifications that increase binding to an Fcγ receptor include amino acid modifications at any one or more of amino acid positions 238, 239, 248, 249, 252, 254, 255, 256, 258, 265, 267, 268, 269, 270, 272, 279, 280, 283, 285, 298, 289, 290, 292, 293, 294, 295, 296, 298, 301, 303, 305, 307, 312, 315, 324, 327, 329, 330, 335, 337, 3338, 340, 360, 373, 376, 379, 382, 388, 389, 398, 414, 416, 419, 430, 434, 435, 437, 438 or 439 of the Fc region, wherein the numbering of the residues in the Fc region is that of the EU index as in abat (WO00/42072).

[0120] Other Fc modifications that can be made to Fcs are those for reducing or ablating binding to FcγR and/or complement proteins, thereby reducing or ablating Fc-mediated effector functions such as ADCC, antibody-dependent cellular phagocytosis (ADCP), and CDC. Exemplary modifications include but are not limited substitutions, insertions, and deletions at positions 234, 235, 236, 237, 267, 269, 325, and 328, wherein numbering is according to the EU index. Exemplary substitutions include but are not limited to 234G, 235G, 236R, 237K, 267R, 269R, 325L, and 328R, wherein numbering is according to the EU index. An Fc variant may comprise 236R/328R. Other modifications for reducing FcγR and complement interactions include substitutions 297A, 234A, 235A, 237A, 318A, 228P, 236E, 268Q, 309L, 330S, 331S, 220S, 226S, 229S, 238S, 233P, and 234V, as well as removal of the glycosylation at position 297 by mutational or enzymatic means or by production in organisms such as bacteria that do not glycosylate proteins. These and other modifications are reviewed in Strohl, 2009, Current Opinion in Biotechnology 20:685-691.

[0121] Optionally, the Fc region may comprise a non-naturally occurring amino acid residue at additional and/or alternative positions known to one skilled in the art (see, e.g., U.S. Pat. Nos. 5,624,821; 6,277,375; 6,737,056; 6,194,551; 7,317,091; 8,101,720; WO00/42072; WO01/58957; WO02/06919; WO04/016750; WO04/029207; WO04/035752; WO04/074455; WO04/099249; WO04/063351; WO05/070963; WO05/040217, WO05/092925 and WO06/020114).

[0122] Fc variants that enhance affinity for an inhibitory receptor FcγRIIb may also be used. Such variants may provide an Fc fusion protein with immune-modulatory activities related to FcγRIIb cells, including, for example, B cells and monocytes. In one embodiment, the Fc variants provide selectively enhanced affinity to FcγRIIb relative to one or more activating receptors. Modifications for altering binding to FcγRIIb include one or more modifications at a position selected from the group consisting of 234, 235, 236, 237, 239, 266, 267, 268, 325, 326, 327, 328, and 332, according to the EU index. Exemplary substitutions for enhancing FcγRIIb affinity include but are not limited to 234D, 234E, 234F, 234W, 235D, 235F, 235R, 235Y, 236D, 236N, 237D, 237N, 239D, 239E, 266M, 267D, 267E, 268D, 268E, 327D, 327E, 328F, 328W, 328Y, and 332E. Exemplary substitutions include 235Y, 236D, 239D, 266M, 267E, 268D, 268E, 328F, 328W, and 328Y. Other Fc variants for enhancing binding to FcγRIIb include 235Y/267E, 236D/267E, 239D/268D, 239D/267E, 267E/268D, 267E/268E, and 267E/328F.

[0123] The affinities and binding properties of an Fc region for its ligand may be determined by a variety of in vitro assay methods (biochemical or immunological based assays) known in the art including but not limited to, equilibrium methods (e.g., ELISA, or radioimmunoassay), or kinetics (e.g., BIACORE analysis), and other methods such as indirect binding assays, competitive inhibition assays, fluorescence resonance energy transfer (FRET), gel electrophoresis and chromatography (e.g., gel filtration). These and other methods may utilize a label on one or more of the components being examined and/or employ a variety of detection methods including but not limited to chromogenic, fluorescent, luminescent, or isotopic labels. A detailed description of binding affinities and kinetics can be found in Paul, W. E., ed., Fundamental Immunology, 4th Ed., Lippincott-Raven, Philadelphia (1999), which focuses on antibody-immunogen interactions.

[0124] In some embodiments, the antibody is modified to increase its biological half-life. Various approaches are possible. For example, this may be done by increasing the binding affinity of the Fc region for FcRn. For example, one or more of the following residues can be mutated: 252, 254, 256, 433, 435, 436, as described in U.S. Pat. No. 6,277,375. Specific exemplary substitutions include one or more of the following: T252L, T254S, and/or T256F. Alternatively, to increase the biological half-life, the antibody can be altered within the CH1 or CL region to contain a salvage receptor binding epitope taken from two loops of a CH2 domain of an Fc region of an IgG, as described in U.S. Pat. Nos. 5,869,046 and 6, 121,022 by Presta et al. Other exemplary variants that increase binding to FcRn and/or improve pharmacokinetic properties include substitutions at positions 259, 308, 428, and 434, including for example 2591, 308F, 428L, 428M, 434S, 434H, 434F, 434Y, and 434M. Other variants that increase Fc binding to FcRn include: 250E, 250Q, 428L, 428F, 250Q/428L (Hinton et al, 2004, J. Biol. Chem. 279(8): 6213-6216, Hinton et al. 2006 Journal of Immunology 176:346-356), 256A, 272A, 286A, 305A, 307A, 307Q, 311A, 312A, 376A, 378Q, 380A, 382A, 434A (Shields et al, Journal of Biological Chemistry, 2001, 276(9):6591-6604), 252F, 252T, 252Y, 252W, 254T, 256S, 256R, 256Q, 256E, 256D, 256T, 309P, 311S, 433R, 433S, 4331, 433P, 433Q, 434H, 434F, 434Y, 252Y/254T/256E, 433K/434F/436H, 308T/309P/311S (Dall Acqua et al. Journal of Immunology, 2002, 169:5171-5180, Dall'Acqua et al., 2006, Journal of Biological Chemistry 281:23514-23524). Other modifications for modulating FcRn binding are described in Yeung et al., 2010, J Immunol, 182:7663-7671. In some embodiments, hybrid IgG isotypes with particular biological characteristics may be used. For example, an IgGl/IgG3 hybrid variant may be constructed by substituting IgG 1 positions in the CH2 and/or CH3 region with the amino acids from IgG3 at positions where the two isotypes differ. Thus a hybrid variant IgG antibody may be constructed that comprises one or more substitutions, e.g., 274Q, 276K, 300F, 339T, 356E, 358M, 384S, 392N, 397M, 422I, 435R, and 436F. In other embodiments described herein, an IgGl/IgG2 hybrid variant may be constructed by substituting IgG2 positions in the CH2 and/or CH3 region with amino acids from IgGl at positions where the two isotypes differ. Thus a hybrid variant IgG antibody may be constructed chat comprises one or more substitutions, e.g., one or more of the following amino acid substitutions: 233E, 234L, 235L, 236G (referring to an insertion of a glycine at position 236), and 321 h.

[0125] Moreover, the binding sites on human IgGl for FcγRI, FcγRII, FcγRIII, and FcRn have been mapped and variants with improved binding have been described (see Shields, R. L. et al. (2001) J. Biol. Chem. 276:6591-6604). Specific mutations at positions 256, 290, 298, 333, 334, and 339 were shown to improve binding to FcγRIII. Additionally, the following combination mutants were shown to improve FcγRIII binding: T256A/S298A, S298A/E333A, S298A/K224A, and S298A/E333A/K334A, which has been shown to exhibit enhanced FcγRIIIa binding and ADCC activity (Shields et al., 2001). Other IgGl variants with strongly enhanced binding to FcγRIIIa have been identified, including variants with S239D/1332E and S239D/1332E/A330L mutations which showed the greatest increase in affinity for FcγRIIIa, a decrease in FcγRIIb binding, and strong cytotoxic activity in cynomolgus monkeys (Lazar et al., 2006). Introduction of the triple mutations into antibodies such as alemtuzumab (CD52-specific), trastuzumab (HER2/neu-specific), rituximab (CD20-specific), and cetuximab (EGFR-specific) translated into greatly enhanced ADCC activity in vitro, and the S239D/1332E variant showed an enhanced capacity to deplete B cells in monkeys (Lazar et al., 2006). In addition, IgGl mutants containing L235V, F243L, R292P, Y300L and P396L mutations which exhibited enhanced binding to FcγRIIIa and concomitantly enhanced ADCC activity in transgenic mice expressing human FcγRIIIa in models of B cell malignancies and breast cancer have been identified (Stavenhagen et al., 2007; Nordstrom et al., 2011). Other Fc mutants that may be used include: S298A/E333A/L334A, S239D/1332E, S239D/1332E/A330L, L235V/F243L/R292P/Y300L/P396L, and M428L/N434S.

[0126] In some embodiments, an Fc is chosen that has reduced binding to FcγRs. An exemplary Fc, e.g., IgGl Fc, with reduced FcγR binding, comprises the following three amino acid substitutions: L234A, L235E, and G237A.

[0127] In some embodiments, an Fc is chosen that has reduced complement fixation. An exemplary Fc, e.g., IgGl Fc, with reduced complement fixation, has the following two amino acid substitutions: A330S and P331S.

[0128] In some embodiments, an Fc is chosen that has essentially no effector function, i.e., it has reduced binding to FcγRs and reduced complement fixation. An exemplary Fc, e.g., IgGl Fc, that is effectorless, comprises the following five mutations: L234A, L235E, G237A, A330S, and P331S.

[0129] When using an IgG4 constant domain, it is usually preferable to include the substitution S228P, which mimics the hinge sequence in IgGl and thereby stabilizes IgG4 molecules.

f. Multivalent Antibodies

[0130] In one embodiment, the antibodies of this disclosure may be monovalent or multivalent (e.g., bivalent, trivalent, etc.). As used herein, the term “valency” refers to the number of potential target binding sites associated with an antibody. Each target binding site specifically binds one target molecule or specific position or locus on a target molecule. When an antibody is monovalent, each binding site of the molecule will specifically bind to a single antigen position or epitope. When an antibody comprises more than one target binding site (multivalent), each target binding site may specifically bind the same or different molecules (e.g., may bind to different ligands or different antigens, or different epitopes or positions on the same antigen). See, for example, U.S.P.N. 2009/0129125. In each case, at least one of the binding sites will comprise an epitope, motif or domain associated with a DLL3 isoform.

[0131] In one embodiment, the antibodies are bispecific antibodies in which the two chains have different specificities, as described in Millstein et al., 1983, Nature, 305:537-539. Other embodiments include antibodies with additional specificities such as trispecific antibodies. Other more sophisticated compatible multispecific constructs and methods of their fabrication are set forth in U.S.P.N. 2009/0155255, as well as WO 94/04690; Suresh et al., 1986, Methods in Enzymology, 121:210; and WO96/27011.

[0132] As stated above, multivalent antibodies may immunospecifically bind to different epitopes of the desired target molecule or may immunospecifically bind to both the target molecule as well as a heterologous epitope, such as a heterologous polypeptide or solid support material. In some embodiments, the multivalent antibodies may include bispecific antibodies or trispecific antibodies. Bispecific antibodies also include cross-linked or “heteroconjugate” antibodies. For example, one of the antibodies in the heteroconjugate can be coupled to avidin, the other to biotin. Such antibodies have, for example, been proposed to target immune system cells to unwanted cells (U.S. Pat. No. 4,676,980), and for treatment of HIV infection (WO 91/00360, WO 92/200373, and EP 03089). Heteroconjugate antibodies may be made using any convenient cross-linking methods. Suitable cross-linking agents are well known in the art and are disclosed in U.S. Pat. No. 4,676,980, along with a number of cross-linking techniques.

[0133] In some embodiments, antibody variable domains with the desired binding specificities (antibody-antigen combining sites) are fused to immunoglobulin constant domain sequences, such as an immunoglobulin heavy chain constant domain comprising at least part of the hinge, CH2, and/or CH3 regions, using methods well known to those of ordinary skill in the art.

g. Antibody Derivatives

[0134] An antibody provided herein may be further modified to contain additional nonproteinaceous moieties that are known in the art and readily available. The moieties suitable for derivatization of the antibody include but are not limited to water-soluble polymers.

[0135] Non-limiting examples of water-soluble polymers include, but are not limited to, PEG, copolymers of ethylene glycol/propylene glycol, carboxymethylcellulose, dextran, polyvinyl alcohol, polyvinyl pyrrolidone, poly-1,3-dioxolane, poly-1,3,6-trioxane, ethylene/maleic anhydride copolymer, polyaminoacids (either homopolymers or random copolymers), and dextran or poly(n-vinyl pyrrolidone)polyethylene glycol, propropylene glycol homopolymers, polypropylene oxide/ethylene oxide co-polymers, polyoxyethylated polyols (e.g., glycerol), polyvinyl alcohol, and mixtures thereof. Polyethylene glycol propionaldehyde may have advantages in manufacturing due to its stability in water. The polymer may be of any molecular weight and may be branched or unbranched. The number of polymers attached to the antibody may vary, and if more than one polymer is attached, they can be the same or different molecules. In general, the number and/or type of polymers used for derivatization can be determined based on considerations including, but not limited to, the particular properties or functions of the antibody to be improved, whether the antibody derivative will be used in a therapy under defined conditions, etc.

[0136] In another embodiment, conjugates of an antibody and nonproteinaceous moiety that may be selectively heated by exposure to radiation are provided. In one embodiment, the nonproteinaceous moiety is a carbon nanotube (Kam et al., Proc. Natl. Acad. Sci. USA 102: 11600-11605 (2005)). The radiation may be of any wavelength, and includes, but is not limited to, wavelengths that do not harm ordinary cells, but which heat the nonproteinaceous moiety to a temperature at which cells proximal to the antibody-nonproteinaceous moiety are killed.

[0137] Another modification of the antibodies described herein is pegylation. An antibody can be pegylated to, for example, increase the biological (e.g., serum) half-life of the antibody. To pegylate an antibody, the antibody, or fragment thereof, typically is reacted with PEG, such as a reactive ester or aldehyde derivative of PEG, under conditions in which one or more PEG groups become attached to the antibody or antibody fragment. Preferably, the pegylation is carried out via an acylation reaction or an alkylation reaction with a reactive PEG molecule (or an analogous reactive water-soluble polymer). As used herein, the term “polyethylene glycol” is intended to encompass any of the forms of PEG that have been used to derivatize other proteins, such as mono (CI-CIO) alkoxy- or aryloxy-polyethylene glycol or polyethylene glycol-maleimide. In some embodiments, the antibody to be pegylated is an aglycosylated antibody. Methods for pegylating proteins are known in the art and can be applied to the antibodies described herein. See, for example, EP 0 154 316 by Nishimura et al. and EP0401384 by Ishikawa et al.

[0138] The present disclosure also encompasses a human monoclonal antibody described herein conjugated to a therapeutic agent, a polymer, a detectable label or enzyme. In one embodiment, the therapeutic agent is a cytotoxic agent. In one embodiment, the polymer is PEG.

h. Nucleic Acids, Expression Cassettes, and Vectors

[0139] The present disclosure provides isolated nucleic acid segments that encode the polypeptides, peptide fragments, and coupled proteins of this disclosure. The nucleic acid segments of this disclosure also include segments that encode for the same amino acids due to the degeneracy of the genetic code. For example, the amino acid threonine is encoded by ACU, ACC, ACA, and ACG and is therefore degenerate. It is intended that the disclosure includes all variations of the polynucleotide segments that encode for the same amino acids. Such mutations are known in the art (Watson et al., Molecular Biology of the Gene, Benjamin Cummings 1987). Mutations also include alteration of a nucleic acid segment to encode for conservative amino acid changes, for example, the substitution of leucine for isoleucine and so forth. Such mutations are also known in the art. Thus, the genes and nucleotide sequences of this disclosure include both the naturally occurring sequences as well as mutant forms.

[0140] The nucleic acid segments of this disclosure may be contained within a vector. A vector may include, but is not limited to, any plasmid, phagemid, F-factor, virus, cosmid, or phage in a double- or single-stranded linear or circular form which may or may not be self transmissible or mobilizable. The vector can also transform a prokaryotic or eukaryotic host either by integration into the cellular genome or exist extra-chromosomally (e.g., autonomous replicating plasmid with an origin of replication).

[0141] Preferably the nucleic acid segment in the vector is under the control of, and operably linked to, an appropriate promoter or other regulatory elements for transcription in vitro or in a host cell, such as a eukaryotic cell, or a microbe, e.g., bacteria. The vector may be a shuttle vector that functions in multiple hosts. The vector may also be a cloning vector that typically contains one or a small number of restriction endonuclease recognition sites at which foreign DNA sequences can be inserted in a determinable fashion. Such insertion can occur without loss of essential biological function of the cloning vector. A cloning vector may also contain a marker gene that is suitable for use in the identification and selection of cells transformed with the cloning vector. Examples of marker genes are tetracycline resistance or ampicillin resistance. Many cloning vectors are commercially available (Stratagene, New England Biolabs, Clonetech).

[0142] The nucleic acid segments of this disclosure may also be inserted into an expression vector. Typically an expression vector contains prokaryotic DNA elements coding for a bacterial replication origin and an antibiotic resistance gene to provide for the amplification and selection of the expression vector in a bacterial host; regulatory elements that control initiation of transcription such as a promoter; and DNA elements that control the processing of transcripts such as introns, or a transcription termination/polyadenylation sequence.

[0143] Methods to introduce nucleic acid segment into a vector are available in the art (Sambrook et al., Molecular Cloning: A Laboratory Manual, 3rd edition, Cold Spring Harbor Press, Cold Spring Harbor, N.Y. (2001)). Briefly, a vector into which a nucleic acid segment is to be inserted is treated with one or more restriction enzymes (restriction endonuclease) to produce a linearized vector having a blunt end, a “sticky” end with a 5′ or a 3′ overhang, or any combination of the above. The vector may also be treated with a restriction enzyme and subsequently treated with another modifying enzyme, such as a polymerase, an exonuclease, a phosphatase or a kinase, to create a linearized vector that has characteristics useful for ligation of a nucleic acid segment into the vector. The nucleic acid segment that is to be inserted into the vector is treated with one or more restriction enzymes to create a linearized segment having a blunt end, a “sticky” end with a 5′ or a 3′ overhang, or any combination of the above. The nucleic acid segment may also be treated with a restriction enzyme and subsequently treated with another DNA modifying enzyme. Such DNA modifying enzymes include, but are not limited to, polymerase, exonuclease, phosphatase or a kinase, to create a nucleic acid segment that has characteristics useful for ligation of a nucleic acid segment into the vector.

[0144] The treated vector and nucleic acid segment are then ligated together to form a construct containing a nucleic acid segment according to methods available in the art (Sambrook et al., Molecular Cloning: A Laboratory Manual, 3rd edition, Cold Spring Harbor Press, Cold Spring Harbor, N.Y. (2001)). Briefly, the treated nucleic acid fragment, and the treated vector are combined in the presence of a suitable buffer and ligase. The mixture is then incubated under appropriate conditions to allow the ligase to ligate the nucleic acid fragment into the vector.

[0145] The disclosure also provides an expression cassette which contains a nucleic acid sequence capable of directing expression of a particular nucleic acid segment of this disclosure, either in vitro or in a host cell. Also, a nucleic acid segment of this disclosure may be inserted into the expression cassette such that an anti-sense message is produced. The expression cassette is an isolatable unit such that the expression cassette may be in linear form and functional for in vitro transcription and translation assays. The materials and procedures to conduct these assays are commercially available from Promega Corp. (Madison, Wis.). For example, an in vitro transcript may be produced by placing a nucleic acid sequence under the control of a T7 promoter and then using T7 RNA polymerase to produce an in vitro transcript. This transcript may then be translated in vitro through use of a rabbit reticulocyte lysate. Alternatively, the expression cassette can be incorporated into a vector allowing for replication and amplification of the expression cassette within a host cell or also in vitro transcription and translation of a nucleic acid segment.

[0146] Such an expression cassette may contain one or a plurality of restriction sites allowing for placement of the nucleic acid segment under the regulation of a regulatory sequence. The expression cassette can also contain a termination signal operably linked to the nucleic acid segment as well as regulatory sequences required for proper translation of the nucleic acid segment. The expression cassette containing the nucleic acid segment may be chimeric, meaning that at least one of its components is heterologous with respect to at least one of its other components. The expression cassette may also be one that is naturally occurring but has been obtained in a recombinant form useful for heterologous expression. Expression of the nucleic acid segment in the expression cassette may be under the control of a constitutive promoter or an inducible promoter, which initiates transcription only when the host cell is exposed to some particular external stimulus.

[0147] The expression cassette may include in the 5′-3′ direction of transcription, a transcriptional and translational initiation region, a nucleic acid segment and a transcriptional and translational termination region functional in vivo and/or in vitro. The termination region may be native with the transcriptional initiation region, may be native with the nucleic acid segment, or may be derived from another source.

[0148] The regulatory sequence can be a polynucleotide sequence located upstream (5′ non-coding sequences), within, or downstream (3′ non-coding sequences) of a coding sequence, and which influences the transcription, RNA processing or stability, or translation of the associated coding sequence. Regulatory sequences can include, but are not limited to, enhancers, promoters, repressor binding sites, translation leader sequences, introns, and polyadenylation signal sequences. They may include natural and synthetic sequences as well as sequences, which may be a combination of synthetic and natural sequences. While regulatory sequences are not limited to promoters, some useful regulatory sequences include constitutive promoters, inducible promoters, regulated promoters, tissue-specific promoters, viral promoters, and synthetic promoters.

[0149] A promoter is a nucleotide sequence that controls the expression of the coding sequence by providing the recognition for RNA polymerase and other factors required for proper transcription. A promoter includes a minimal promoter, consisting only of all basal elements needed for transcription initiation, such as a TATA-box and/or initiator that is a short DNA sequence comprised of a TATA-box and other sequences that serve to specify the site of transcription initiation, to which regulatory elements are added for control of expression. A promoter may be derived entirely from a native gene, or be composed of different elements derived from different promoters found in nature, or even be comprised of synthetic DNA segments. A promoter may contain DNA sequences that are involved in the binding of protein factors that control the effectiveness of transcription initiation in response to physiological or developmental conditions.

[0150] The disclosure also provides a construct containing a vector and an expression cassette. The vector may be selected from, but not limited to, any vector previously described. Into this vector may be inserted an expression cassette through methods known in the art and previously described (Sambrook et al., Molecular Cloning: A Laboratory Manual, 3rd edition, Cold Spring Harbor Press, Cold Spring Harbor, N.Y. (2001)). In one embodiment, the regulatory sequences of the expression cassette may be derived from a source other than the vector into which the expression cassette is inserted. In another embodiment, a construct containing a vector and an expression cassette is formed upon insertion of a nucleic acid segment of this disclosure into a vector that itself contains regulatory sequences. Thus, an expression cassette is formed upon insertion of the nucleic acid segment into the vector. Vectors containing regulatory sequences are available commercially, and methods for their use are known in the art (Clonetech, Promega, Stratagene).

[0151] In another aspect, this disclosure also provides (i) a nucleic acid molecule encoding a polypeptide chain of the antibody or antigen-binding fragment thereof described above; (ii) a vector comprising the nucleic acid molecule as described; and (iii) a cultured host cell comprising the vector as described. Also provided is a method for producing a polypeptide, comprising: (a) obtaining the cultured host cell as described; (b) culturing the cultured host cell in a medium under conditions permitting expression of a polypeptide encoded by the vector and assembling of an antibody or fragment thereof; and (c) purifying the antibody or fragment from the cultured cell or the medium of the cell.

i. Methods of Production

[0152] Antibodies may be produced using recombinant methods and compositions, e.g., as described in U.S. Pat. No. 4,816,567. In one embodiment, an isolated nucleic acid encoding an antibody described herein is provided. Such nucleic acid may encode an amino acid sequence comprising the VL and/or an amino acid sequence comprising the VH of the antibody (e.g., the light and/or heavy chains of the antibody). In a further embodiment, one or more vectors (e.g., expression vectors) comprising such nucleic acid are provided. In a further embodiment, a host cell comprising such nucleic acid is provided. In one such embodiment, a host cell comprises (e.g., has been transformed with): (1) a vector comprising a nucleic acid that encodes an amino acid sequence comprising the VL of the antibody and an amino acid sequence comprising the VH of the antibody, or (2) a first vector comprising a nucleic acid that encodes an amino acid sequence comprising the VL of the antibody and a second vector comprising a nucleic acid that encodes an amino acid sequence comprising the VH of the antibody. In one embodiment, the host cell is eukaryotic, e.g., a Chinese Hamster Ovary (CHO) cell or lymphoid cell (e.g., YO, NSO, Sp20 cell). In one embodiment, a method of making an antibody is provided, wherein the method comprises culturing a host cell comprising a nucleic acid encoding the antibody, as provided above, under conditions suitable for expression of the antibody, and optionally recovering the antibody from the host cell (or host cell culture medium).

[0153] For recombinant production of an antibody, a nucleic acid encoding an antibody, e.g., as described above, is isolated and inserted into one or more vectors for further cloning and/or expression in a host cell. Such nucleic acid may be readily isolated and sequenced using conventional procedures (e.g., by using oligonucleotide probes that are capable of binding specifically to genes encoding the heavy and light chains of the antibody).

[0154] Suitable host cells for cloning or expression of antibody-encoding vectors include prokaryotic or eukaryotic cells described herein. For example, antibodies may be produced in bacteria, in particular when glycosylation and Fc effector function are not needed. For expression of antibody fragments and polypeptides in bacteria, see, e.g., U.S. Pat. Nos. 5,648,237, 5,789,199, and 5,840,523. (See also Charlton, Methods in Molecular Biology, Vol. 248 (B. K. C. Lo, ed., Humana Press, Totowa, N.J., 2003), pp. 245-254, describing expression of antibody fragments in E. coli.) After expression, the antibody may be isolated from the bacterial cell paste in a soluble fraction and can be further purified.

[0155] In addition to prokaryotes, eukaryotic microbes such as filamentous fungi or yeast are suitable cloning or expression hosts for antibody-encoding vectors, including fungi and yeast strains whose glycosylation pathways have been “humanized,” resulting in the production of an antibody with a partially or fully human glycosylation pattern. See Gerngross, Nat. Biotech. 22:1409-1414 (2004), and Li et al., Nat. Biotech. 24:210-215 (2006).

[0156] Suitable host cells for the expression of glycosylated antibody are also derived from multicellular organisms (invertebrates and vertebrates). Examples of invertebrate cells include plant and insect cells. Numerous baculoviral strains have been identified, which may be used in conjunction with insect cells, particularly for transfection of Spodoptera frugiperda cells.

[0157] Plant cell cultures can also be utilized as hosts. See, e.g., U.S. Pat. Nos. 5,959,177, 6,040,498, 6,420,548, 7,125,978, and 6,417,429 (describing PLANTIBODIES technology for producing antibodies in transgenic plants).

[0158] Vertebrate cells may also be used as hosts. For example, mammalian cell lines that are adapted to grow in suspension may be useful. Other examples of useful mammalian host cell lines are monkey kidney CV1 line transformed by SV40 (COS-7); human embryonic kidney line (293 or 293 cells as described, e.g., in Graham et al., J. Gen Virol. 36:59 (1977)); baby hamster kidney cells (BHK); mouse sertoli cells (TM4 cells as described, e.g., in Mather, Biol. Reprod. 23:243-251 (1980)); monkey kidney cells (CV1); African green monkey kidney cells (VERO-76); human cervical carcinoma cells (HELA); canine kidney cells (MDCK; buffalo rat liver cells (BRL 3A); human lung cells (W138); human liver cells (Hep G2); mouse mammary tumor (MMT 060562); TRI cells, as described, e.g., in Mather et al., Annals N.Y. Acad. Sci. 383:44-68 (1982); MRC 5 cells; and FS4 cells. Other useful mammalian host cell lines include CHO cells, including DHFR-CHO cells (Urlaub et al., Proc. Natl. Acad. Sci. USA 77:4216 (1980)); and myeloma cell lines such as YO, NSO, and Sp2/0. For a review of certain mammalian host cell lines suitable for antibody production, see, e.g., Yazaki and Wu, Methods in Molecular Biology, Vol. 248 (B. K. C. Lo, ed., Humana Press, Totowa, N.J.), pp. 255-268 (2003).

### B. Compositions and Formulations

[0159] The antibodies of this disclosure represent an excellent way for the development of antiviral therapies either alone or in antibody cocktails with additional anti-SARS-COV-2 virus antibodies for the treatment of human SARS-COV-2 infections in humans.

[0160] In another aspect, the present disclosure provides a pharmaceutical composition comprising the antibodies of the present disclosure described herein formulated together with a pharmaceutically acceptable carrier. The composition may optionally contain one or more additional pharmaceutically active ingredients, such as another antibody or a therapeutic agent.

[0161] The pharmaceutical compositions also can be administered in a combination therapy with, for example, another immune-stimulatory agent, an antiviral agent, or a vaccine, etc. In some embodiments, a composition comprises an antibody of this disclosure at a concentration of at least 1 mg/ml, 5 mg/ml, 10 mg/ml, 50 mg/ml, 100 mg/ml, 150 mg/ml, 200 mg/ml, 1-300 mg/ml, or 100-300 mg/ml.

[0162] In some embodiments, the second therapeutic agent comprises an anti-inflammatory drug or an antiviral compound. In some embodiments, the antiviral compound comprises: a nucleoside analog, a peptoid, an oligopeptide, a polypeptide, a protease inhibitor, a 3C-like protease inhibitor, a papain-like protease inhibitor, or an inhibitor of an RNA dependent RNA polymerase. In some embodiments, the antiviral compound may include: acyclovir, gancyclovir, vidarabine, foscarnet, cidofovir, amantadine, ribavirin, trifluorothymidine, zidovudine, didanosine, zalcitabine or an interferon. In some embodiments, the interferon is an interferon-α or an interferon-ß.

[0163] Also within the scope of this disclosure is use of the pharmaceutical composition in the preparation of a medicament for the diagnosis, prophylaxis, treatment, or combination thereof of a condition resulting from a SARS-COV-2.

[0164] The pharmaceutical composition can comprise any number of excipients. Excipients that can be used include carriers, surface-active agents, thickening or emulsifying agents, solid binders, dispersion or suspension aids, solubilizers, colorants, flavoring agents, coatings, disintegrating agents, lubricants, sweeteners, preservatives, isotonic agents, and combinations thereof. The selection and use of suitable excipients is taught in Gennaro, ed., Remington: The Science and Practice of Pharmacy, 20th Ed. (Lippincott Williams & Wilkins 2003), the disclosure of which is incorporated herein by reference.

[0165] Preferably, a pharmaceutical composition is suitable for intravenous, intramuscular, subcutaneous, parenteral, spinal or epidermal administration (e.g., by injection or infusion). Depending on the route of administration, the active compound can be coated in a material to protect it from the action of acids and other natural conditions that may inactivate it. The phrase “parenteral administration” as used herein means modes of administration other than enteral and topical administration, usually by injection, and includes, without limitation, intravenous, intramuscular, intraarterial, intrathecal, intracapsular, intraorbital, intracardiac, intradermal, intraperitoneal, transtracheal, subcutaneous, subcuticular, intraarticular, subcapsular, subarachnoid, intraspinal, epidural and intrasternal injection and infusion. Alternatively, an antibody of the present disclosure described herein can be administered via a non-parenteral route, such as a topical, epidermal or mucosal route of administration, e.g., intranasally, orally, vaginally, rectally, sublingually or topically.

[0166] The pharmaceutical compositions of this disclosure may be prepared in many forms that include tablets, hard or soft gelatin capsules, aqueous solutions, suspensions, and liposomes and other slow-release formulations, such as shaped polymeric gels. An oral dosage form may be formulated such that the antibody is released into the intestine after passing through the stomach. Such formulations are described in U.S. Pat. No. 6,306,434 and in the references contained therein.

[0167] Oral liquid pharmaceutical compositions may be in the form of, for example, aqueous or oily suspensions, solutions, emulsions, syrups or elixirs, or may be presented as a dry product for constitution with water or other suitable vehicle before use. Such liquid pharmaceutical compositions may contain conventional additives such as suspending agents, emulsifying agents, non-aqueous vehicles (which may include edible oils), or preservatives.

[0168] An antibody can be formulated for parenteral administration (e.g., by injection, for example, bolus injection or continuous infusion) and may be presented in unit dosage form in ampules, prefilled syringes, small volume infusion containers or multi-dose containers with an added preservative. The pharmaceutical compositions may take such forms as suspensions, solutions, or emulsions in oily or aqueous vehicles, and may contain formulatory agents such as suspending, stabilizing and/or dispersing agents. Pharmaceutical compositions suitable for rectal administration can be prepared as unit dose suppositories. Suitable carriers include saline solution and other materials commonly used in the art.

[0169] For administration by inhalation, an antibody can be conveniently delivered from an insufflator, nebulizer or a pressurized pack or other convenient means of delivering an aerosol spray. Pressurized packs may comprise a suitable propellant such as dichlorodifluoromethane, trichlorofluoromethane, dichlorotetrafluoroethane, carbon dioxide or other suitable gas. In the case of a pressurized aerosol, the dosage unit may be determined by providing a valve to deliver a metered amount.

[0170] Alternatively, for administration by inhalation or insufflation, an antibody may take the form of a dry powder composition, for example, a powder mix of a modulator and a suitable powder base such as lactose or starch. The powder composition may be presented in unit dosage form in, for example, capsules or cartridges or, e.g., gelatin or blister packs from which the powder may be administered with the aid of an inhalator or insufflator. For intra-nasal administration, an antibody may be administered via a liquid spray, such as via a plastic bottle atomizer.

[0171] Pharmaceutical compositions may also contain other ingredients such as flavorings, colorings, anti-microbial agents, or preservatives. It will be appreciated that the amount of an antibody required for use in treatment will vary not only with the particular carrier selected but also with the route of administration, the nature of the condition being treated and the age and condition of the patient. Ultimately the attendant health care provider may determine proper dosage. In addition, a pharmaceutical composition may be formulated as a single unit dosage form.

[0172] The pharmaceutical composition of the present disclosure can be in the form of sterile aqueous solutions or dispersions. It can also be formulated in a microemulsion, liposome, or other ordered structure suitable to high drug concentration.

[0173] An antibody of the present disclosure described herein can be administered as a sustained release formulation, in which case less frequent administration is required. Dosage and frequency vary depending on the half-life of the antibody in the patient. In general, human antibodies show the longest half-life, followed by humanized antibodies, chimeric antibodies, and nonhuman antibodies. The dosage and frequency of administration can vary depending on whether the treatment is prophylactic or therapeutic. In prophylactic applications, a relatively low dosage is administered at relatively infrequent intervals over a long period of time. Some patients continue to receive treatment for the rest of their lives. In therapeutic applications, a relatively high dosage at relatively short intervals is sometimes required until progression of the disease is reduced or terminated, and preferably, until the patient shows partial or complete amelioration of symptoms of disease. Thereafter, the patient can be administered a prophylactic regime.

[0174] The amount of active ingredient that can be combined with a carrier material to produce a single dosage form will vary depending upon the subject being treated and the particular mode of administration and will generally be that amount of the composition, which produces a therapeutic effect. Generally, out of one hundred percent, this amount will range from about 0.01% to about 99% of active ingredient, preferably from about 0.1% to about 70%, most preferably from about 1% to about 30% of active ingredient in combination with a pharmaceutically acceptable carrier.

[0175] Dosage regimens can be adjusted to provide the optimum desired response (e.g., a therapeutic response). For example, a single bolus can be administered, several divided doses can be administered over time or the dose can be proportionally reduced or increased as indicated by the exigencies of the therapeutic situation. It is especially advantageous to formulate parenteral compositions in dosage unit form for ease of administration and uniformity of dosage. Dosage unit form as used herein refers to physically discrete units suited as unitary dosages for the subjects to be treated; each unit contains a predetermined quantity of active compound calculated to produce the desired therapeutic effect in association with the required pharmaceutical carrier. Alternatively, the antibody can be administered as a sustained release formulation, in which case less frequent administration is required. For administration of the antibody, the dosage ranges from about 0.0001 to 800 mg/kg, and more usually 0.01 to 5 mg/kg, of the host body weight. For example dosages can be 0.3 mg/kg body weight, 1 mg/kg body weight, 3 mg/kg body weight, 5 mg/kg body weight or 10 mg/kg body weight or within the range of 1-10 mg/kg. An exemplary treatment regime entails administration once per week, once every two weeks, once every three weeks, once every four weeks, once a month, once every 3 months or once every three to 6 months. Preferred dosage regimens for an antibody of this disclosure include 1 mg/kg body weight or 3 mg/kg body weight via intravenous administration, with the antibody being given using one of the following dosing schedules: (i) every four weeks for six dosages, then every three months; (ii) every three weeks; (iii) 3 mg/kg body weight once followed by 1 mg/kg body weight every three weeks. In some methods, dosage is adjusted to achieve a plasma antibody concentration of about 1-1000 μg/ml and in some methods about 25-300 μg/ml. A “therapeutically effective dosage” of an antibody of this disclosure preferably results in a decrease in severity of disease symptoms, an increase in frequency and duration of disease symptom-free periods, or a prevention of impairment or disability due to the disease affliction. For example, for the treatment of SARS-COV-2 infection in a subject, a “therapeutically effective dosage” preferably inhibits SARS-COV-2 virus replication or uptake by host cells by at least about 20%, more preferably by at least about 40%, even more preferably by at least about 60%, and still more preferably by at least about 80% relative to untreated subjects. A therapeutically effective amount of a therapeutic compound can neutralize SARS-COV-2 virus, or otherwise ameliorate symptoms in a subject, which is typically a human or can be another mammal.

[0176] The pharmaceutical composition can be a controlled release formulation, including implants, transdermal patches, and microencapsulated delivery systems. Biodegradable, biocompatible polymers can be used, such as ethylene vinyl acetate, polyanhydrides, polyglycolic acid, collagen, polyorthoesters, and polylactic acid. See, e.g., Sustained and Controlled Release Drug Delivery Systems, J. R. Robinson, ed., Marcel Dekker, Inc., New York, 1978.

[0177] Therapeutic compositions can be administered via medical devices such as (1) needleless hypodermic injection devices (e.g., U.S. Pat. Nos. 5,399,163; 5,383,851; 5,312,335; 5,064,413; 4,941,880; 4,790,824; and 4,596,556); (2) micro-infusion pumps (U.S. Pat. No. 4,487,603); (3) transdermal devices (U.S. Pat. No. 4,486,194); (4) infusion apparati (U.S. Pat. Nos. 4,447,233 and 4,447,224); and (5) osmotic devices (U.S. Pat. Nos. 4,439,196 and 4,475,196); the disclosures of which are incorporated herein by reference.

[0178] In some embodiments, the human monoclonal antibodies of this disclosure described herein can be formulated to ensure proper distribution in vivo. For example, to ensure that the therapeutic compounds of this disclosure cross the blood-brain barrier, they can be formulated in liposomes, which may additionally comprise targeting moieties to enhance selective transport to specific cells or organs. See, e.g., U.S. Pat. Nos. 4,522,811; 5,374,548; 5,416,016; and 5,399,331; V. V. Ranade (1989) Clin. Pharmacol. 29:685; Umezawa et al., (1988) Biochem. Biophys. Res. Commun. 153:1038; Bloeman et al. (1995) FEBS Lett. 357:140; M. Owais et al. (1995) Antimicrob. Agents Chemother. 39:180; Briscoe et al. (1995) Am. Physiol. 1233:134; Schreier et al. (1994). Biol. Chem. 269:9090; Keinanen and Laukkanen (1994) FEBS Lett. 346:123; and Killion and Fidler (1994) Immunomethods 4:273.

[0179] In some embodiments, the initial dose may be followed by administration of a second or a plurality of subsequent doses of the antibody or antigen-binding fragment thereof in an amount that can be approximately the same or less than that of the initial dose, wherein the subsequent doses are separated by at least 1 day to 3 days; at least one week, at least 2 weeks; at least 3 weeks; at least 4 weeks; at least 5 weeks; at least 6 weeks; at least 7 weeks; at least 8 weeks; at least 9 weeks; at least 10 weeks; at least 12 weeks; or at least 14 weeks.

[0180] Various delivery systems are known and can be used to administer the pharmaceutical composition of this disclosure, e.g., encapsulation in liposomes, microparticles, microcapsules, recombinant cells capable of expressing the mutant viruses, receptor-mediated endocytosis (see, e.g., Wu et al. (1987) J. Biol. Chem. 262:4429-4432). Methods of introduction include, but are not limited to, intradermal, transdermal, intramuscular, intraperitoneal, intravenous, subcutaneous, intranasal, epidural, and oral routes. The composition may be administered by any convenient route, for example, by infusion or bolus injection, by absorption through epithelial or mucocutaneous linings (e.g., oral mucosa, rectal and intestinal mucosa, etc.) and may be administered together with other biologically active agents. Administration can be systemic or local. The pharmaceutical composition can also be delivered in a vesicle, in particular, a liposome (see, for example, Langer (1990) Science 249: 1527-1533).

[0181] The use of nanoparticles to deliver the antibodies of the present disclosure is also contemplated herein. Antibody-conjugated nanoparticles may be used both for therapeutic and diagnostic applications. Antibody-conjugated nanoparticles and methods of preparation and use are described in detail by Arruebo, M., et al. 2009 (“Antibody-conjugated nanoparticles for biomedical applications” in J. Nanomat. Volume 2009, Article ID 439389), incorporated herein by reference. Nanoparticles may be developed and conjugated to antibodies contained in pharmaceutical compositions to target cells. Nanoparticles for drug delivery have also been described in, for example, U.S. Pat. No. 8,257,740, or U.S. Pat. No. 8,246,995, each incorporated herein in its entirety.

[0182] In certain situations, the pharmaceutical composition can be delivered in a controlled release system. In one embodiment, a pump may be used. In another embodiment, polymeric materials can be used. In yet another embodiment, a controlled release system can be placed in proximity of the composition's target, thus requiring only a fraction of the systemic dose.

[0183] The injectable preparations may include dosage forms for intravenous, subcutaneous, intracutaneous, intracranial, intraperitoneal and intramuscular injections, drip infusions, etc. These injectable preparations may be prepared by methods publicly known. For example, the injectable preparations may be prepared, e.g., by dissolving, suspending or emulsifying the antibody or its salt described above in a sterile aqueous medium or an oily medium conventionally used for injections. As the aqueous medium for injections, there are, for example, physiological saline, an isotonic solution containing glucose and other auxiliary agents, etc., which may be used in combination with an appropriate solubilizing agent such as an alcohol (e.g., ethanol), a polyalcohol (e.g., propylene glycol, polyethylene glycol), a nonionic surfactant [e.g., polysorbate 80, HCO-50 (polyoxyethylene (50 mol) adduct of hydrogenated castor oil)], etc. As the oily medium, there are employed, e.g., sesame oil, soybean oil, etc., which may be used in combination with a solubilizing agent such as benzyl benzoate, benzyl alcohol, etc. The injection thus prepared is preferably filled in an appropriate ampoule.

[0184] A pharmaceutical composition of the present disclosure can be delivered subcutaneously or intravenously with a standard needle and syringe. In addition, with respect to subcutaneous delivery, a pen delivery device readily has applications in delivering a pharmaceutical composition of the present disclosure. Such a pen delivery device can be reusable or disposable. A reusable pen delivery device generally utilizes a replaceable cartridge that contains a pharmaceutical composition. Once all of the pharmaceutical composition within the cartridge has been administered and the cartridge is empty, the empty cartridge can readily be discarded and replaced with a new cartridge that contains the pharmaceutical composition. The pen delivery device can then be reused. In a disposable pen delivery device, there is no replaceable cartridge. Rather, the disposable pen delivery device comes prefilled with the pharmaceutical composition held in a reservoir within the device. Once the reservoir is emptied of the pharmaceutical composition, the entire device is discarded.

[0185] Numerous reusable pen and autoinjector delivery devices have applications in the subcutaneous delivery of a pharmaceutical composition of the present disclosure. Examples include, but certainly are not limited to AUTOPEN™ (Owen Mumford, Inc., Woodstock, UK), DISETRONIC™ pen (Disetronic Medical Systems, Burghdorf, Switzerland), HUMALOG MIX 75/25™ pen, HUMALOG™ pen, HUMALIN 70/30™ pen (Eli Lilly and Co., Indianapolis, IN), NOVOPEN™ I, II and III (Novo Nordisk, Copenhagen, Denmark), NOVOPEN JUNIOR™ (Novo Nordisk, Copenhagen, Denmark), BD™ pen (Becton Dickinson, Franklin Lakes, NJ), OPTIPEN™, OPTIPEN PRO™, OPTIPEN STARLET™, and OPTICLIK™ (Sanofi-Aventis, Frankfurt, Germany), to name only a few. Examples of disposable pen delivery devices having applications in subcutaneous delivery of a pharmaceutical composition of the present disclosure include, but certainly are not limited to the SOLOSTAR™ pen (Sanofi-Aventis), the FLEXPEN™ (Novo Nordisk), and the KWIKPEN™ (Eli Lilly), the SURECLICK™ Autoinjector (Amgen, Thousand Oaks, CA), the PENLET™ (Haselmeier, Stuttgart, Germany), the EPIPEN (Dey, L.P.) and the HUMIRA™ Pen (Abbott Labs, Abbott Park, Ill.), to name only a few.

[0186] Advantageously, the pharmaceutical compositions for oral or parenteral use described above are prepared into dosage forms in a unit dose suited to fit a dose of the active ingredients. Such dosage forms in a unit dose include, for example, tablets, pills, capsules, injections (ampoules), suppositories, etc. The amount of the antibody contained is generally about 5 to about 500 mg per dosage form in a unit dose; especially in the form of injection, it is preferred that the antibody is contained in about 5 to about 300 mg and in about 10 to about 300 mg for the other dosage forms.

### C. Methods and Uses

[0187] a. Methods of Treatment

[0188] The antibodies, compositions, and formulations described herein can be used to neutralize SARS-COV-2 virus and thereby treating or preventing SARS-COV-2 infections.

[0189] Accordingly, in one aspect, this disclosure further provides a method of neutralizing SARS-COV-2 in a subject, comprising administering to a subject in need thereof a therapeutically effective amount of the antibody or antigen-binding fragment thereof or a therapeutically effective amount of the pharmaceutical composition, as described above.

[0190] In another aspect, this disclosure additionally provides a method of preventing or treating a SARS-COV-2 infection, comprising administering to a subject in need thereof a therapeutically effective amount of the antibody or antigen-binding fragment thereof or a therapeutically effective amount of the pharmaceutical composition, as described above.

[0191] The neutralizing of the SARS-COV-2 virus can be done via (i) inhibiting SARS-COV-2 virus binding to a target cell; (ii) inhibiting SARS-COV-2 virus uptake by a target cell; (iii) inhibiting SARS-COV-2 virus replication; and (iv) inhibiting SARS-COV-2 virus particles release from infected cells. One skilled in the art possesses the ability to perform any assay to assess neutralization of SARS-COV-2 virus.

[0192] Notably, the neutralizing properties of antibodies may be assessed by a variety of tests, which all may assess the consequences of (i) inhibition of SARS-COV-2 virus binding to a target cell; (ii) inhibition of SARS-COV-2 virus uptake by a target cell; (iii) inhibition of SARS-COV-2 virus replication; and (iv) inhibition of SARS-COV-2 virus particles release from infected cells. In other words, implementing different tests may lead to the observation of the same consequence, i.e., the loss of infectivity of the SARS-COV-2 virus. Thus, in one embodiment, the present disclosure provides a method of neutralizing SARS-COV-2 virus in a subject comprising administering to the subject a therapeutically effective amount of the antibody of the present disclosure described herein.

[0193] Another aspect of the present disclosure provides a method of treating a SARS-COV-2-related disease. Such a method includes therapeutic (following SARS-COV-2 infection) and prophylactic (prior to SARS-COV-2 exposure, infection or pathology). For example, therapeutic and prophylactic methods of treating an individual for a SARS-COV-2 infection include treatment of an individual having or at risk of having a SARS-COV-2 infection or pathology, treating an individual with a SARS-COV-2 infection, and methods of protecting an individual from a SARS-CoV-2 infection, to decrease or reduce the probability of a SARS-COV-2 infection in an individual, to decrease or reduce susceptibility of an individual to a SARS-COV-2 infection, or to inhibit or prevent a SARS-COV-2 infection in an individual, and to decrease, reduce, inhibit or suppress transmission of a SARS-COV-2 from an infected individual to an uninfected individual. Such methods include administering an antibody of the present disclosure or a composition comprising the antibody disclosed herein to therapeutically or prophylactically treat (vaccinate or immunize) an individual having or at risk of having a SARS-COV-2 infection or pathology. Accordingly, methods can treat the SARS-COV-2 infection or pathology, or provide the individual with protection from infection (e.g., prophylactic protection).

[0194] In one embodiment, a method of treating a SARS-COV-2-related disease comprises administering to an individual in need thereof an antibody or therapeutic composition disclosed herein in an amount sufficient to reduce one or more physiological conditions or symptoms associated with a SARS-COV-2 infection or pathology, thereby treating the SARS-COV-2-related disease.

[0195] In one embodiment, an antibody or therapeutic composition disclosed herein is used to treat a SARS-COV-2-related disease. Use of an antibody or therapeutic composition disclosed herein treats a SARS-COV-2-related disease by reducing one or more physiological conditions or symptoms associated with a SARS-COV-2 infection or pathology. In aspects of this embodiment, administration of an antibody or therapeutic composition disclosed herein is in an amount sufficient to reduce one or more physiological conditions or symptoms associated with a SARS-CoV-2 infection or pathology, thereby treating the SARS-COV-2-based disease. In other aspects of this embodiment, administration of an antibody or therapeutic composition disclosed herein is in an amount sufficient to increase, induce, enhance, augment, promote or stimulate SARS-COV-2 clearance or removal; or decrease, reduce, inhibit, suppress, prevent, control, or limit transmission of SARS-COV-2 to another individual.

[0196] One or more physiological conditions or symptoms associated with a SARS-COV-2 infection or pathology will respond to a method of treatment disclosed herein. The symptoms of SARS-COV-2 infection or pathology vary, depending on the phase of infection.

[0197] In some embodiments, the method of neutralizing SARS-COV-2 in a subject comprises administering to a subject in need thereof a therapeutically effective amount of a first antibody or antigen-binding fragment thereof and a second antibody or antigen-binding fragment thereof of the antibody or antigen-binding fragment or a therapeutically effective amount of the pharmaceutical composition, as described above, wherein the first antibody or antigen-binding fragment thereof and the second antibody or antigen binding fragment thereof exhibit synergistic activity.

[0198] In some embodiments, the method of preventing or treating a SARS-COV-2 infection, comprising administering to a subject in need thereof a therapeutically effective amount of a first antibody or antigen-binding fragment thereof and a second antibody or antigen-binding fragment thereof of the antibody or antigen-binding fragment or a therapeutically effective amount of the pharmaceutical composition, as described above, wherein the first antibody or antigen-binding fragment thereof and the second antibody or antigen binding fragment thereof exhibit synergistic activity. In some embodiments, the first antibody or antigen-binding fragment thereof is administered before, after, or concurrently with the second antibody or antigen-binding fragment thereof.

[0199] In some embodiments, the second therapeutic agent comprises an anti-inflammatory drug or an antiviral compound. In some embodiments, the antiviral compound comprises: a nucleoside analog, a peptoid, an oligopeptide, a polypeptide, a protease inhibitor, a 3C-like protease inhibitor, a papain-like protease inhibitor, or an inhibitor of an RNA dependent RNA polymerase. In some embodiments, the antiviral compound may include: acyclovir, gancyclovir, vidarabine, foscarnet, cidofovir, amantadine, ribavirin, trifluorothymidine, zidovudine, didanosine, zalcitabine or an interferon. In some embodiments, the interferon is an interferon-α or an interferon-ß.

[0200] In some embodiments, the antibody or antigen-binding fragment thereof is administered before, after, or concurrently with the second therapeutic agent or therapy. In some embodiments, the antibody or antigen-binding fragment thereof is administered to the subject intravenously, subcutaneously, or intraperitoneally. In some embodiments, the antibody or antigen-binding fragment thereof is administered prophylactically or therapeutically.

[0201] The antibodies described herein can be used together with one or more of other anti-SARS-CoV-2 virus antibodies to neutralize SARS-COV-2 virus and thereby treating SARS-COV-2 infections.

b. Combination Therapies

[0202] Combination therapies may include an anti-SARS-COV-2 antibody as disclosed and any additional therapeutic agent that may be advantageously combined with an antibody of this disclosure or with a biologically active fragment of an antibody of this disclosure. The antibodies of the present disclosure may be combined synergistically with one or more drugs or therapy used to treat a disease or disorder associated with a viral infection, such as a SARS-COV-2 infection. In some embodiments, the antibodies of this disclosure may be combined with a second therapeutic agent to ameliorate one or more symptoms of said disease. In some embodiments, the antibodies of this disclosure may be combined with a second antibody to provide synergistic activity in ameliorating one or more symptoms of said disease. In some embodiments, the first antibody or antigen-binding fragment thereof is administered before, after, or concurrently with the second antibody or antigen-binding fragment thereof.

[0203] For example, the antibody described herein can be used in various detection methods for use in, e.g., monitoring the progression of a SARS-COV-2 infection; monitoring patient response to treatment for such an infection, etc. The present disclosure provides methods of detecting a neuraminidase polypeptide in a biological sample obtained from an individual. The methods generally involve: a) contacting the biological sample with a subject anti-neuraminidase antibody; and b) detecting binding, if any, of the antibody to an epitope present in the sample. In some instances, the antibody comprises a detectable label. The level of neuraminidase polypeptide detected in the biological sample can provide an indication of the stage, degree, or severity of a SARS-COV-2 infection. The level of the neuraminidase polypeptide detected in the biological sample can provide an indication of the individual's response to treatment for a SARS-COV-2 infection.

[0204] In some embodiments, the second therapeutic agent is another antibody to a SARS-COV-2 protein or a fragment thereof. It is contemplated herein to use a combination (“cocktail”) of antibodies with broad neutralization or inhibitory activity against SARS-COV-2. In some embodiments, non-competing antibodies may be combined and administered to a subject in need thereof. In some embodiments, the antibodies comprising the combination bind to distinct non-overlapping epitopes on the protein. In some embodiments, the second antibody may possess longer half-life in human serum.

[0205] As used herein, the term “in combination with” means that additional therapeutically active component(s) may be administered prior to, concurrent with, or after the administration of the anti-SARS-COV-2 antibody of the present disclosure. The term “in combination with” also includes sequential or concomitant administration of an anti-SARS-COV-2 antibody and a second therapeutic agent.

[0206] The additional therapeutically active component(s) may be administered to a subject prior to administration of an anti-SARS-COV-2 antibody of the present disclosure. For example, a first component may be deemed to be administered “prior to” a second component if the first component is administered 1 week before, 72 hours before, 60 hours before, 48 hours before, 36 hours before, 24 hours before, 12 hours before, 6 hours before, 5 hours before, 4 hours before, 3 hours before, 2 hours before, 1 hour before, 30 minutes before, 15 minutes before, 10 minutes before, 5 minutes before, or less than 1 minute before administration of the second component. In other embodiments, the additional therapeutically active component(s) may be administered to a subject after administration of an anti-SARS-COV-2 antibody of the present disclosure. For example, a first component may be deemed to be administered “after” a second component if the first component is administered 1 minute after, 5 minutes after, 10 minutes after, 15 minutes after, 30 minutes after, 1 hour after, 2 hours after, 3 hours after, 4 hours after, 5 hours after, 6 hours after, 12 hours after, 24 hours after, 36 hours after, 48 hours after, 60 hours after, 72 hours after administration of the second component. In yet other embodiments, the additional therapeutically active component(s) may be administered to a subject concurrent with administration of an anti-SARS-COV-2 antibody of the present disclosure. “Concurrent” administration, for purposes of the present disclosure, includes, e.g., administration of an anti-SARS-COV-2 antibody and an additional therapeutically active component to a subject in a single dosage form, or in separate dosage forms administered to the subject within about 30 minutes or less of each other. If administered in separate dosage forms, each dosage form may be administered via the same route (e.g., both the anti-SARS-COV-2 antibody and the additional therapeutically active component may be administered intravenously, etc.); alternatively, each dosage form may be administered via a different route (e.g., the anti-SARS-COV-2 antibody may be administered intravenously, and the additional therapeutically active component may be administered orally). In any event, administering the components in a single dosage from, in separate dosage forms by the same route, or in separate dosage forms by different routes are all considered “concurrent administration,” for purposes of the present disclosure. For purposes of the present disclosure, administration of an anti-SARS-COV-2 antibody “prior to,” “concurrent with,” or “after” (as those terms are defined hereinabove) administration of an additional therapeutically active component is considered administration of an anti-SARS-COV-2 antibody “in combination with” an additional therapeutically active component.

[0207] The present disclosure includes pharmaceutical compositions in which an anti-SARS-COV-2 antibody is co-formulated with one or more of the additional therapeutically active component(s) as described elsewhere herein.

c. Administration Regimens

[0208] According to certain embodiments, a single dose of an anti-SARS-COV-2 antibody (or a pharmaceutical composition comprising a combination of an anti-SARS-COV-2 antibody and any of the additional therapeutically active agents mentioned herein) may be administered to a subject in need thereof. According to certain embodiments of the present disclosure, multiple doses of an anti-SARS-COV-2 antibody (or a pharmaceutical composition comprising a combination of an anti-SARS-COV-2 antibody and any of the additional therapeutically active agents mentioned herein) may be administered to a subject over a defined time course. The methods according to this aspect of this disclosure comprise sequentially administering to a subject multiple doses of an anti-SARS-COV-2 antibody. As used herein, “sequentially administering” means that each dose of anti-SARS-COV-2 antibody is administered to the subject at a different point in time, e.g., on different days separated by a predetermined interval (e.g., hours, days, weeks or months). The present disclosure includes methods which comprise sequentially administering to the patient a single initial dose of an anti-SARS-COV-2 antibody, followed by one or more secondary doses of the anti-SARS-COV-2 antibody, and optionally followed by one or more tertiary doses of the anti-SARS-COV-2 antibody.

[0209] The terms “initial dose,” “secondary doses,” and “tertiary doses,” refer to the temporal sequence of administration of the anti-SARS-COV-2 antibody. Thus, the “initial dose” is the dose which is administered at the beginning of the treatment regimen (also referred to as the “baseline dose”); the “secondary doses” are the doses which are administered after the initial dose; and the “tertiary doses” are the doses which are administered after the secondary doses. The initial, secondary, and tertiary doses may all contain the same amount of anti-SARS-COV-2 antibody, but generally may differ from one another in terms of frequency of administration. In some embodiments, however, the amount of anti-SARS-COV-2 antibody contained in the initial, secondary and/or tertiary doses varies from one another (e.g., adjusted up or down as appropriate) during the course of treatment. In some embodiments, two or more (e.g., 2, 3, 4, or 5) doses are administered at the beginning of the treatment regimen as “loading doses” followed by subsequent doses that are administered on a less frequent basis (e.g., “maintenance doses”).

[0210] In certain exemplary embodiments of the present disclosure, each secondary and/or tertiary dose is administered 1 to 48 hours (e.g., 1, 1½, 2, 21/2, 3, 3½, 4, 4½, 5, 5½, 6, 6½, 7, 7½, 8, 8½, 9, 9½, 10, 10½, 11, 11½, 12, 12½, 13, 13½, 14, 14½, 15, 15½, 16, 16½, 17, 17½, 18, 18½, 19, 19½, 20, 20½, 21, 21½, 22, 22½, 23, 23½, 24, 24½, 25, 25½, 26, 26½, or more) after the immediately preceding dose. The phrase “the immediately preceding dose,” as used herein, means, in a sequence of multiple administrations, the dose of anti-SARS-COV-2 antibody, which is administered to a patient prior to the administration of the very next dose in the sequence with no intervening doses.

[0211] The methods, according to this aspect of this disclosure, may comprise administering to a patient any number of secondary and/or tertiary doses of an anti-SARS-COV-2 antibody. For example, In some embodiments, only a single secondary dose is administered to the patient. In other embodiments, two or more (e.g., 2, 3, 4, 5, 6, 7, 8, or more) secondary doses are administered to the patient. Likewise, In some embodiments, only a single tertiary dose is administered to the patient. In other embodiments, two or more (e.g., 2, 3, 4, 5, 6, 7, 8, or more) tertiary doses are administered to the patient.

[0212] In some embodiments, the frequency at which the secondary and/or tertiary doses are administered to a patient can vary over the course of the treatment regimen. The frequency of administration may also be adjusted during the course of treatment by a physician depending on the needs of the individual patient following clinical examination.

d. Diagnostic Uses of the Antibodies

[0213] The anti-SARS-COV-2 antibodies may be used to detect and/or measure SARS-COV-2 in a sample, e.g., for diagnostic purposes. Some embodiments contemplate the use of one or more antibodies in assays to detect a SARS-COV-2-associated-disease or disorder. Exemplary diagnostic assays for SARS-COV-2 may comprise, e.g., contacting a sample, obtained from a patient, with an anti-SARS-COV-2 antibody of this disclosure, wherein the anti-SARS-COV-2 antibody is labeled with a detectable label or reporter molecule or used as a capture ligand to selectively isolate SARS-COV-2 from patient samples. Alternatively, an unlabeled anti-SARS-COV-2 antibody can be used in diagnostic applications in combination with a secondary antibody, which is itself detectably labeled. The detectable label or reporter molecule can be a radioisotope, such as H, C, P, S, or I; a fluorescent or chemiluminescent moiety such as fluorescein isothiocyanate, or rhodamine; or an enzyme such as alkaline phosphatase, ß-galactosidase, horseradish peroxidase, or luciferase. Specific exemplary assays that can be used to detect or measure SARS-COV-2 in a sample include enzyme-linked immunosorbent assay (ELISA), radioimmunoassay (RIA), and fluorescence-activated cell sorting (FACS).

[0214] In another aspect, this disclosure further provides a method for detecting the presence of SARS COV-2 in a sample comprising the steps of: (i) contacting a sample with the antibody or antigen-binding fragment thereof described above; and (ii) determining binding of the antibody or antigen-binding fragment to one or more SARS COV-2 antigens, wherein binding of the antibody to the one or more SARS COV-2 antigens is indicative of the presence of SARS COV-2 in the sample.

[0215] In some embodiments, the SARS-COV-2 antigen comprises an S polypeptide, such as an S polypeptide of a human or an animal SARS-COV-2. In some embodiments, the SARS-COV-2 antigen comprises the receptor-binding domain (RBD) of the S polypeptide. In some embodiments, the RBD comprises amino acids 319-541 of the S polypeptide.

[0216] In some embodiments, the antibody or antigen-binding fragment thereof is conjugated to a label. In some embodiments, the step of detecting comprises contacting a secondary antibody with the antibody or antigen-binding fragment thereof and wherein the secondary antibody comprises a label. In some embodiments, the label includes a fluorescent label, a chemiluminescent label, a radiolabel, and an enzyme.

[0217] In some embodiments, the step of detecting comprises detecting fluorescence or chemiluminescence. In some embodiments, the step of detecting comprises a competitive binding assay or ELISA.

[0218] In some embodiments, the method further comprises binding the sample to a solid support. In some embodiments, the solid support includes microparticles, microbeads, magnetic beads, and an affinity purification column.

[0219] Samples that can be used in SARS-COV-2 diagnostic assays according to the present disclosure include any tissue or fluid sample obtainable from a patient, which contains detectable quantities of either SARS-COV-2 protein, or fragments thereof, under normal or pathological conditions. Generally, levels of SARS-COV-2 protein in a particular sample obtained from a healthy patient (e.g., a patient not afflicted with a disease associated with SARS-COV-2) will be measured to initially establish a baseline, or standard, level of SARS-COV-2. This baseline level of SARS-COV-2 can then be compared against the levels of SARS-COV-2 measured in samples obtained from individuals suspected of having a SARS-COV-2-associated condition, or symptoms associated with such condition.

[0220] The antibodies specific for SARS-COV-2 protein may contain no additional labels or moieties, or they may contain an N-terminal or C-terminal label or moiety. In one embodiment, the label or moiety is biotin. In a binding assay, the location of a label (if any) may determine the orientation of the peptide relative to the surface upon which the peptide is bound. For example, if a surface is coated with avidin, a peptide containing an N-terminal biotin will be oriented such that the C-terminal portion of the peptide will be distal to the surface.

### D. Kits

[0221] In another aspect, this disclosure provides a kit comprising a pharmaceutically acceptable dose unit of the antibody or antigen-binding fragment thereof of or the pharmaceutical composition as described above. Also within the scope of this disclosure is a kit for the diagnosis, prognosis or monitoring the treatment of SARS-COV-2 in a subject, comprising: the antibody or antigen-binding fragment thereof as described; and a least one detection reagent that binds specifically to the antibody or antigen-binding fragment thereof.

[0222] In some embodiments, the kit also includes a container that contains the composition and optionally informational material. The informational material can be descriptive, instructional, marketing or other material that relates to the methods described herein and/or the use of the agents for therapeutic benefit. In an embodiment, the kit also includes an additional therapeutic agent, as described above. For example, the kit includes a first container that contains the composition and a second container for the additional therapeutic agent.

[0223] The informational material of the kits is not limited in its form. In some embodiments, the informational material can include information about production of the composition, concentration, date of expiration, batch or production site information, and so forth. In one embodiment, the informational material relates to methods of administering the composition, e.g., in a suitable dose, dosage form, or mode of administration (e.g., a dose, dosage form, or mode of administration described herein), to treat a subject in need thereof. In one embodiment, the instructions provide a dosing regimen, dosing schedule, and/or route of administration of the composition or the additional therapeutic agent. The information can be provided in a variety of formats, including printed text, computer-readable material, video recording, or audio recording, or information that contains a link or address to substantive material.

[0224] The kit can include one or more containers for the composition. In some embodiments, the kit contains separate containers, dividers or compartments for the composition and informational material. For example, the composition can be contained in a bottle or vial, and the informational material can be contained in a plastic sleeve or packet. In other embodiments, the separate elements of the kit are contained within a single, undivided container. For example, the composition is contained in a bottle or vial that has attached thereto the informational material in the form of a label. In some embodiments, the kit includes a plurality (e.g., a pack) of individual containers, each containing one or more unit dosage forms (e.g., a dosage form described herein) of the agents.

[0225] The kit optionally includes a device suitable for administration of the composition or other suitable delivery device. The device can be provided pre-loaded with one or both of the agents or can be empty, but suitable for loading. Such a kit may optionally contain a syringe to allow for injection of the antibody contained within the kit into an animal, such as a human.

### E. Definitions

[0226] To aid in understanding the detailed description of the compositions and methods according to the disclosure, a few express definitions are provided to facilitate an unambiguous disclosure of the various aspects of this disclosure. Unless otherwise defined, all technical and scientific terms used herein have the same meaning as commonly understood by one of ordinary skill in the art to which this disclosure belongs.

[0227] The term “antibody” as referred to herein includes whole antibodies and any antigen-binding fragment or single chains thereof. Whole antibodies are glycoproteins comprising at least two heavy (H) chains and two light (L) chains inter-connected by disulfide bonds. Each heavy chain is comprised of a heavy chain variable region (abbreviated herein as VH) and a heavy chain constant region. The heavy chain constant region is comprised of three domains, CH1, CH2, and CH3. Each light chain is comprised of a light chain variable region (abbreviated herein as VL) and a light chain constant region. The light chain constant region is comprised of one domain, CL. The VH and VL regions can be further subdivided into regions of hypervariability, termed complementarity determining regions (CDR), interspersed with regions that are more conserved, termed framework regions (FR). Each VH and VL is composed of three CDRs and four FRs, arranged from amino-terminus to carboxy-terminus in the following order: FRl, CDRl, FR2, CDR2, FR3, CDR3, FR4. The heavy chain variable region CDRs and FRs are HFRl, HCDRl, HFR2, HCDR2, HFR3, HCDR3, HFR4. The light chain variable region CDRs and FRs are LFRl, LCDRl, LFR2, LCDR2, LFR3, LCDR3, LFR4. The variable regions of the heavy and light chains contain a binding domain that interacts with an antigen. The constant regions of the antibodies can mediate the binding of the immunoglobulin to host tissues or factors, including various cells of the immune system (e.g., effector cells) and the first component (CIq) of the classical complement system.

[0228] The term “antigen-binding fragment or portion” of an antibody (or simply “antibody fragment or portion”), as used herein, refers to one or more fragments of an antibody that retain the ability to specifically bind to an antigen (e.g., a Spike or S protein of SARS-COV-2 virus). It has been shown that the antigen-binding function of an antibody can be performed by fragments of a full-length antibody. Examples of binding fragments encompassed within the term “antigen-binding fragment or portion” of an antibody include (i) a Fab fragment, a monovalent fragment consisting of the VL, VH, CL and CHI domains; (ii) a F(ab′)2 fragment, a bivalent fragment comprising two Fab fragments linked by a disulfide bridge at the hinge region; (iii) a Fab′ fragment, which is essentially a Fab with part of the hinge region (see, FUNDAMENTAL IMMUNOLOGY (Paul ed., 3rd ed. 1993)); (iv) a Fd fragment consisting of the VH and CHI domains; (v) a Fv fragment consisting of the VL and VH domains of a single arm of an antibody, (vi) a dAb fragment (Ward et al., (1989) Nature 341:544-546), which consists of a VH domain; (vii) an isolated CDR; and (viii) a nanobody, a heavy chain variable region containing a single variable domain and two constant domains. Furthermore, although the two domains of the Fv fragment, VL and VH, are coded for by separate genes, they can be joined, using recombinant methods, by a synthetic linker that enables them to be made as a single protein chain in which the VL and VH regions pair to form monovalent molecules (known as single chain Fv or scFv); see, e.g., Bird et al. (1988) Science 242:423-426; and Huston et al. (1988) Proc. Natl. Acad. Sci. USA 85:5879-5883). Such single chain antibodies are also intended to be encompassed within the term “antigen-binding fragment or portion” of an antibody. These antibody fragments are obtained using conventional techniques known to those with skill in the art, and the fragments are screened for utility in the same manner as are intact antibodies.

[0229] An “isolated antibody,” as used herein, is intended to refer to an antibody that is substantially free of other antibodies having different antigenic specificities (e.g., an isolated antibody that specifically binds to a Spike or S protein of SARS-COV-2 virus is substantially free of antibodies that specifically bind antigens other than the neuraminidase). An isolated antibody can be substantially free of other cellular material and/or chemicals.

[0230] The terms “monoclonal antibody” or “monoclonal antibody composition” as used herein refer to a preparation of antibody molecules of single molecular composition. A monoclonal antibody composition displays a single binding specificity and affinity for a particular epitope.

[0231] The term “human antibody” is intended to include antibodies having variable regions in which both the framework and CDR regions are derived from human germline immunoglobulin sequences. Furthermore, if the antibody contains a constant region, the constant region also is derived from human germline immunoglobulin sequences. The human antibodies of this disclosure can include amino acid residues not encoded by human germline immunoglobulin sequences (e.g., mutations introduced by random or site-specific mutagenesis in vitro or by somatic mutation in vivo). However, the term “human antibody,” as used herein, is not intended to include antibodies in which CDR sequences derived from the germline of another mammalian species, such as a mouse, have been grafted onto human framework sequences.

[0232] The term “human monoclonal antibody” refers to antibodies displaying a single binding specificity, which have variable regions in which both the framework and CDR regions are derived from human germline immunoglobulin sequences. In one embodiment, the human monoclonal antibodies can be produced by a hybridoma that includes a B cell obtained from a transgenic nonhuman animal, e.g., a transgenic mouse, having a genome comprising a human heavy chain transgene and a light chain transgene fused to an immortalized cell.

[0233] The term “recombinant human antibody,” as used herein, includes all human antibodies that are prepared, expressed, created or isolated by recombinant means, such as (a) antibodies isolated from an animal (e.g., a mouse) that is transgenic or transchromosomal for human immunoglobulin genes or a hybridoma prepared therefrom (described further below), (b) antibodies isolated from a host cell transformed to express the human antibody, e.g., from a transfectoma, (c) antibodies isolated from a recombinant, combinatorial human antibody library, and (d) antibodies prepared, expressed, created or isolated by any other means that involve splicing of human immunoglobulin gene sequences to other DNA sequences. Such recombinant human antibodies have variable regions in which the framework and CDR regions are derived from human germline immunoglobulin sequences. In some embodiments, however, such recombinant human antibodies can be subjected to in vitro mutagenesis (or, when an animal transgenic for human Ig sequences is used, in vivo somatic mutagenesis) and thus the amino acid sequences of the VH and VL regions of the recombinant antibodies are sequences that, while derived from and related to human germline VH and VL sequences, may not naturally exist within the human antibody germline repertoire in vivo.

[0234] The term “isotype” refers to the antibody class (e.g., IgM or IgG1) that is encoded by the heavy chain constant region genes. The phrases “an antibody recognizing an antigen” and “an antibody specific for an antigen” are used interchangeably herein with the term “an antibody which binds specifically to an antigen.”

[0235] The term “human antibody derivatives” refers to any modified form of the human antibody, e.g., a conjugate of the antibody and another agent or antibody. The term “humanized antibody” is intended to refer to antibodies in which CDR sequences derived from the germline of another mammalian species, such as a mouse, have been grafted onto human framework sequences. Additional framework region modifications can be made within the human framework sequences.

[0236] The term “chimeric antibody” is intended to refer to antibodies in which the variable region sequences are derived from one species, and the constant region sequences are derived from another species, such as an antibody in which the variable region sequences are derived from a mouse antibody, and the constant region sequences are derived from a human antibody. The term can also refer to an antibody in which its variable region sequence or CDR(s) is derived from one source (e.g., an IgA1 antibody) and the constant region sequence or Fc is derived from a different source (e.g., a different antibody, such as an IgG, IgA2, IgD, IgE or IgM antibody).

[0237] This disclosure encompasses isolated or substantially purified nucleic acids, peptides, polypeptides or proteins. In the context of the present disclosure, an “isolated” nucleic acid, DNA or RNA molecule or an “isolated” polypeptide is a nucleic acid, DNA molecule, RNA molecule, or polypeptide that exists apart from its native environment and is therefore not a product of nature. An isolated nucleic acid, DNA molecule, RNA molecule or polypeptide may exist in a purified form or may exist in a non-native environment such as, for example, a transgenic host cell. A “purified” nucleic acid molecule, peptide, polypeptide or protein, or a fragment thereof, is substantially free of other cellular material, or culture medium when produced by recombinant techniques, or substantially free of chemical precursors or other chemicals when chemically synthesized. In one embodiment, an “isolated” nucleic acid is free of sequences that naturally flank the nucleic acid (i.e., sequences located at the 5′ and 3′ ends of the nucleic acid) in the genomic DNA of the organism from which the nucleic acid is derived. For example, in various embodiments, the isolated nucleic acid molecule can contain less than about 5 kb, 4 kb, 3 kb, 2 kb, 1 kb, 0.5 kb, or 0.1 kb of nucleotide sequences that naturally flank the nucleic acid molecule in genomic DNA of the cell from which the nucleic acid is derived. A protein, peptide or polypeptide that is substantially free of cellular material includes preparations of protein, peptide or polypeptide having less than about 30%, 20%, 10%, or 5% (by dry weight) of contaminating protein. When the protein or biologically active portion thereof, is recombinantly produced, preferably culture medium represents less than about 30%, 20%, 10%, or 5% (by dry weight) of chemical precursors or non-protein-of-interest chemicals.

[0238] The terms polypeptide, peptide, and protein are used interchangeably herein.

[0239] The terms “polypeptide,” “peptide,” and “protein” are used interchangeably herein to refer to polymers of amino acids of any length. The polymer may be linear or branched, it may comprise modified amino acids, and it may be interrupted by non-amino acids. The terms also encompass an amino acid polymer that has been modified; for example, disulfide bond formation, glycosylation, lipidation, acetylation, phosphorylation, pegylation, or any other manipulation, such as conjugation with a labeling component. As used herein, the term “amino acid” includes natural and/or unnatural or synthetic amino acids, including glycine and both the D or L optical isomers, and amino acid analogs and peptidomimetics.

[0240] A peptide or polypeptide “fragment” as used herein refers to a less than full-length peptide, polypeptide or protein. For example, a peptide or polypeptide fragment can have is at least about 3, at least about 4, at least about 5, at least about 10, at least about 20, at least about 30, at least about 40 amino acids in length, or single unit lengths thereof. For example, fragment may be 6, 7, 8, 9, 10, 11, 12, 13, 14, 15, 16, 17, or more amino acids in length. There is no upper limit to the size of a peptide fragment. However, in some embodiments, peptide fragments can be less than about 500 amino acids, less than about 400 amino acids, less than about 300 amino acids or less than about 250 amino acids in length. Preferably the peptide fragment can elicit an immune response when used to inoculate an animal. A peptide fragment may be used to elicit an immune response by inoculating an animal with a peptide fragment in combination with an adjuvant, a peptide fragment that is coupled to an adjuvant, or a peptide fragment that is coupled to arsanilic acid, sulfanilic acid, an acetyl group, or a picryl group. A peptide fragment can include a non-amide bond and can be a peptidomimetic.

[0241] As used herein, the term “conjugate” or “conjugation” or “linked” as used herein refers to the attachment of two or more entities to form one entity. A conjugate encompasses both peptide-small molecule conjugates as well as peptide-protein/peptide conjugates.

[0242] The term “recombinant,” as used herein, refers to antibodies or antigen-binding fragments thereof of this disclosure created, expressed, isolated or obtained by technologies or methods known in the art as recombinant DNA technology which include, e.g., DNA splicing and transgenic expression. The term refers to antibodies expressed in a non-human mammal (including transgenic non-human mammals, e.g., transgenic mice), or a cell (e.g., CHO cells) expression system or isolated from a recombinant combinatorial human antibody library.

[0243] A “nucleic acid” or “polynucleotide” refers to a DNA molecule (for example, but not limited to, a cDNA or genomic DNA) or an RNA molecule (for example, but not limited to, an mRNA), and includes DNA or RNA analogs. A DNA or RNA analog can be synthesized from nucleotide analogs. The DNA or RNA molecules may include portions that are not naturally occurring, such as modified bases, modified backbone, deoxyribonucleotides in an RNA, etc. The nucleic acid molecule can be single-stranded or double-stranded.

[0244] The term “substantial identity” or “substantially identical,” when referring to a nucleic acid or fragment thereof, indicates that, when optimally aligned with appropriate nucleotide insertions or deletions with another nucleic acid (or its complementary strand), there is nucleotide sequence identity in at least about 90%, and more preferably at least about 95%, 96%, 97%, 98% or 99% of the nucleotide bases, as measured by any well-known algorithm of sequence identity, such as FASTA, BLAST or GAP, as discussed below. A nucleic acid molecule having substantial identity to a reference nucleic acid molecule may, in certain instances, encode a polypeptide having the same or substantially similar amino acid sequence as the polypeptide encoded by the reference nucleic acid molecule.

[0245] As applied to polypeptides, the term “substantial similarity” or “substantially similar” means that two peptide sequences, when optimally aligned, such as by the programs GAP or BESTFIT using default gap weights, share at least 90% sequence identity, even more preferably at least 95%, 98% or 99% sequence identity. Preferably, residue positions, which are not identical, differ by conservative amino acid substitutions. A “conservative amino acid substitution” is one in which an amino acid residue is substituted by another amino acid residue having a side chain (R group) with similar chemical properties (e.g., charge or hydrophobicity). In general, a conservative amino acid substitution will not substantially change the functional properties of a protein. In cases where two or more amino acid sequences differ from each other by conservative substitutions, the percent or degree of similarity may be adjusted upwards to correct for the conservative nature of the substitution. Means for making this adjustment are well known to those of skill in the art. See, e.g., Pearson (1994) Methods Mol. Biol. 24: 307-331, which is herein incorporated by reference. Examples of groups of amino acids that have side chains with similar chemical properties include 1) aliphatic side chains: glycine, alanine, valine, leucine, and isoleucine; 2) aliphatic-hydroxyl side chains: serine and threonine; 3) amide-containing side chains: asparagine and glutamine; 4) aromatic side chains: phenylalanine, tyrosine, and tryptophan; 5) basic side chains: lysine, arginine, and histidine; 6) acidic side chains: aspartate and glutamate, and 7) sulfur-containing side chains: cysteine and methionine. Preferred conservative amino acids substitution groups are: valine-leucine-isoleucine, phenylalanine-tyrosine, lysine-arginine, alanine-valine, glutamate-aspartate, and asparagine-glutamine. Alternatively, a conservative replacement is any change having a positive value in the PAM250 log-likelihood matrix disclosed in Gonnet et al. (1992) Science 256: 1443 45, herein incorporated by reference. A “moderately conservative” replacement is any change having a nonnegative value in the PAM250 log-likelihood matrix.

[0246] Sequence similarity for polypeptides is typically measured using sequence analysis software. Protein analysis software matches similar sequences using measures of similarity assigned to various substitutions, deletions, and other modifications, including conservative amino acid substitutions. For instance, GCG software contains programs such as GAP and BESTFIT, which can be used with default parameters to determine sequence homology or sequence identity between closely related polypeptides, such as homologous polypeptides from different species of organisms or between a wild type protein and a mutein thereof. See, e.g., GCG Version 6.1. Polypeptide sequences also can be compared using FASTA with default or recommended parameters; a program in GCG Version 6.1. FASTA (e.g., FASTA2 and FASTA3) provides alignments and percent sequence identity of the regions of the best overlap between the query and search sequences (Pearson (2000) supra). Another preferred algorithm when comparing a sequence of this disclosure to a database containing a large number of sequences from different organisms is the computer program BLAST, especially BLASTP or TBLASTN, using default parameters. See, e.g., Altschul et al. (1990) J. Mol. Biol. 215: 403-410 and (1997) Nucleic Acids Res. 25:3389-3402, each of which is herein incorporated by reference.

[0247] As used herein, the term “affinity” refers to the strength of the sum total of noncovalent interactions between a single binding site of a molecule (e.g., an antibody) and its binding partner (e.g., an antigen). Unless indicated otherwise, as used herein, “binding affinity” refers to intrinsic binding affinity, which reflects a 1:1 interaction between members of a binding pair (e.g., antibody and antigen). The affinity of a molecule X for its partner Y can generally be represented by the dissociation constant (KD). Affinity can be measured by common methods known in the art, including those described herein.

[0248] The term “specifically binds,” or “binds specifically to,” or the like, refers to an antibody that binds to a single epitope, e.g., under physiologic conditions., but which does not bind to more than one epitope. Accordingly, an antibody that specifically binds to a polypeptide will bind to an epitope that present on the polypeptide, but which is not present on other polypeptides. Specific binding can be characterized by an equilibrium dissociation constant of at least about 1×10-8 M or less (e.g., a smaller KD denotes a tighter binding). Methods for determining whether two molecules specifically bind are well known in the art and include, for example, equilibrium dialysis, surface plasmon resonance, and the like. As described herein, antibodies have been identified by surface plasmon resonance, e.g., BIACORE™, which bind specifically to a Spike or S protein of SARS-COV-2 virus.

[0249] Preferably, the antibody binds to a Spike or S protein with “high affinity,” namely with a KD of 1×10-7 M or less, more preferably 5×10-8 M or less, more preferably 3×10-8 M or less, more preferably 1×10-8 M or less, more preferably 5×10-9 M or less or even more preferably 1×10-9 M or less, as determined by surface plasmon resonance, e.g., BIACORE. The term “does not substantially bind” to a protein or cells, as used herein, means does not bind or does not bind with a high affinity to the protein or cells, i.e., binds to the protein or cells with a KD of 1×10-6 M or more, more preferably 1×10-5 M or more, more preferably 1×10-4 M or more, more preferably 1×10-3 M or more, even more preferably 1×10-2 M or more.

[0250] The term “Kassoc” or “Ka,” as used herein, is intended to refer to the association rate of a particular antibody-antigen interaction, whereas the term “Kdis” or “Kd,” as used herein, is intended to refer to the dissociation rate of a particular antibody-antigenn interaction. The term “KD,” as used herein, is intended to refer to the dissociation constant, which is obtained from the ratio of Kd to Ka (i.e., Kd/Ka) and is expressed as a molar concentration (M). KD values for antibodies can be determined using methods well established in the art. A preferred method for determining the KD of an antibody is by using surface plasmon resonance, preferably using a biosensor system such as a BIACORE system.

[0251] Antibodies that “compete with another antibody for binding to a target” refer to antibodies that inhibit (partially or completely) the binding of the other antibody to the target. Whether two antibodies compete with each other for binding to a target, i.e., whether and to what extent one antibody inhibits the binding of the other antibody to a target, may be determined using known competition experiments. In some embodiments, an antibody competes with, and inhibits binding of another antibody to a target by at least 10%, 20%, 30%, 40%, 50%, 60%, 70%, 80%, 90% or 100%. The level of inhibition or competition may be different depending on which antibody is the “blocking antibody” (i.e., the cold antibody that is incubated first with the target). Competition assays can be conducted as described, for example, in Ed Harlow and David Lane, Cold Spring Harb Protoc; 2006 or in Chapter 11 of “Using Antibodies” by Ed Harlow and David Lane, Cold Spring Harbor Laboratory Press, Cold Spring Harbor, NY, USA 1999. Competing antibodies bind to the same epitope, an overlapping epitope or to adjacent epitopes (e.g., as evidenced by steric hindrance). Other competitive binding assays include: solid phase direct or indirect radioimmunoassay (RIA), solid phase direct or indirect enzyme immunoassay (EIA), sandwich competition assay (see Stahli et al., Methods in Enzymology 9:242 (1983)); solid phase direct biotin-avidin EIA (see Kirkland et al., J. Immunol. 137:3614 (1986)); solid phase direct labeled assay, solid phase direct labeled sandwich assay (see Harlow and Lane, Antibodies: A Laboratory Manual, Cold Spring Harbor Press (1988)); solid phase direct label RIA using 1-125 label (see Morel et al., Mol. Immunol. 25(1):7 (1988)); solid phase direct biotin-avidin EIA (Cheung et al., Virology 176:546 (1990)); and direct labeled RIA. (Moldenhauer et al., Scand. J. Immunol. 32:77 (1990)).

[0252] The term “epitope” as used herein refers to an antigenic determinant that interacts with a specific antigen-binding site in the variable region of an antibody molecule known as a paratope. A single antigen may have more than one epitope. Thus, different antibodies may bind to different areas on an antigen and may have different biological effects. The term “epitope” also refers to a site on an antigen to which B and/or T cells respond. It also refers to a region of an antigen that is bound by an antibody. Epitopes may be defined as structural or functional. Functional epitopes are generally a subset of the structural epitopes and have those residues that directly contribute to the affinity of the interaction. Epitopes may also be conformational, that is, composed of nonlinear amino acids. In some embodiments, epitopes may include determinants that are chemically active surface groupings of molecules such as amino acids, sugar side chains, phosphoryl groups, or sulfonyl groups, and, In some embodiments, may have specific three-dimensional structural characteristics, and/or specific charge characteristics. An epitope typically includes at least 3, 4, 5, 6, 7, 8, 9, 10, 11, 12, 13, 14 or 15 amino acids in a unique spatial conformation. Methods for determining what epitopes are bound by a given antibody (i.e., epitope mapping) are well known in the art and include, for example, immunoblotting and immune-precipitation assays, wherein overlapping or contiguous peptides from a Spike or S protein are tested for reactivity with a given antibody. Methods of determining spatial conformation of epitopes include techniques in the art and those described herein, for example, x-ray crystallography and 2-dimensional nuclear magnetic resonance (see, e.g., Epitope Mapping Protocols in Methods in Molecular Biology, Vol. 66, G. E. Morris, Ed. (1996)).

[0253] The term “epitope mapping” refers to the process of identification of the molecular determinants for antibody-antigen recognition.

[0254] The term “binds to an epitope” or “recognizes an epitope” with reference to an antibody or antibody fragment refers to continuous or discontinuous segments of amino acids within an antigen. Those of skill in the art understand that the terms do not necessarily mean that the antibody or antibody fragment is in direct contact with every amino acid within an epitope sequence.

[0255] The term “binds to the same epitope” with reference to two or more antibodies means that the antibodies bind to the same, overlapping or encompassing continuous or discontinuous segments of amino acids. Those of skill in the art understand that the phrase “binds to the same epitope” does not necessarily mean that the antibodies bind to or contact exactly the same amino acids. The precise amino acids that the antibodies contact can differ. For example, a first antibody can bind to a segment of amino acids that is completely encompassed by the segment of amino acids bound by a second antibody. In another example, a first antibody binds one or more segments of amino acids that significantly overlap the one or more segments bound by the second antibody. For the purposes herein, such antibodies are considered to “bind to the same epitope.”

[0256] As used herein, the term “immune response” refers to a biological response within a vertebrate against foreign agents, which response protects the organism against these agents and diseases caused by them. An immune response is mediated by the action of a cell of the immune system (for example, a T lymphocyte, B lymphocyte, natural killer (NK) cell, macrophage, eosinophil, mast cell, dendritic cell or neutrophil) and soluble macromolecules produced by any of these cells or the liver (including antibodies, cytokines, and complement) that results in selective targeting, binding to, damage to, destruction of, and/or elimination from the vertebrate's body of invading pathogens, cells or tissues infected with pathogens, cancerous or other abnormal cells, or, in cases of autoimmunity or pathological inflammation, normal human cells or tissues. An immune reaction includes, e.g., activation or inhibition of a T cell, e.g., an effector T cell or a Th cell, such as a CD4+ or CD8+ T cell, or the inhibition of a Treg cell.

[0257] The term “detectable label” as used herein refers to a molecule capable of detection, including, but not limited to, radioactive isotopes, fluorescers, chemiluminescers, chromophores, enzymes, enzyme substrates, enzyme cofactors, enzyme inhibitors, chromophores, dyes, metal ions, metal sols, ligands (e.g., biotin, avidin, streptavidin or haptens), intercalating dyes and the like. The term “fluorescer” refers to a substance or a portion thereof that is capable of exhibiting fluorescence in the detectable range.

[0258] In many embodiments, the terms “subject” and “patient” are used interchangeably irrespective of whether the subject has or is currently undergoing any form of treatment. As used herein, the terms “subject” and “subjects” may refer to any vertebrate, including, but not limited to, a mammal (e.g., cow, pig, camel, llama, horse, goat, rabbit, sheep, hamsters, guinea pig, cat, dog, rat, and mouse, a non-human primate (for example, a monkey, such as a cynomolgus monkey, chimpanzee, etc.) and a human). The subject may be a human or a non-human. In more exemplary aspects, the mammal is a human. As used herein, the expression “a subject in need thereof” or “a patient in need thereof” means a human or non-human mammal that exhibits one or more symptoms or indications of disorders (e.g., neuronal disorders, autoimmune diseases, and cardiovascular diseases), and/or who has been diagnosed with inflammatory disorders. In some embodiments, the subject is a mammal. In some embodiments, the subject is human.

[0259] As used herein, the term “disease” is intended to be generally synonymous and is used interchangeably with, the terms “disorder” and “condition” (as in medical condition), in that all reflect an abnormal condition (e.g., inflammatory disorder) of the human or animal body or of one of its parts that impairs normal functioning, is typically manifested by distinguishing signs and symptoms, and causes the human or animal to have a reduced duration or quality of life.

[0260] As used herein, the term “treating” or “treatment” of any disease or disorder refers in one embodiment, to ameliorating the disease or disorder (i.e., arresting or reducing the development of the disease or at least one of the clinical symptoms thereof). In another embodiment, “treating” or “treatment” refers to ameliorating at least one physical parameter, which may not be discernible by the patient. In yet another embodiment, “treating” or “treatment” refers to modulating the disease or disorder, either physically (e.g., stabilization of a discernible symptom), physiologically (e.g., stabilization of a physical parameter), or both. In yet another embodiment, “treating” or “treatment” refers to preventing or delaying the onset or development or progression of the disease or disorder.

[0261] The terms “prevent,” “preventing,” “prevention,” “prophylactic treatment” and the like refer to reducing the probability of developing a disorder or condition in a subject, who does not have, but is at risk of or susceptible to developing a disorder or condition.

[0262] The terms “decrease,” “reduced,” “reduction,” “decrease,” or “inhibit” are all used herein generally to mean a decrease by a statistically significant amount. However, for avoidance of doubt, “reduced,” “reduction” or “decrease” or “inhibit” means a decrease by at least 10% as compared to a reference level, for example, a decrease by at least about 20%, or at least about 30%, or at least about 40%, or at least about 50%, or at least about 60%, or at least about 70%, or at least about 80%, or at least about 90% or up to and including a 100% decrease (e.g., absent level as compared to a reference sample), or any decrease between 10-100% as compared to a reference level.

[0263] As used herein, the term “agent” denotes a chemical compound, a mixture of chemical compounds, a biological macromolecule (such as a nucleic acid, an antibody, a protein or portion thereof, e.g., a peptide), or an extract made from biological materials such as bacteria, plants, fungi, or animal (particularly mammalian) cells or tissues. The activity of such agents may render it suitable as a “therapeutic agent,” which is a biologically, physiologically, or pharmacologically active substance (or substances) that acts locally or systemically in a subject.

[0264] As used herein, the terms “therapeutic agent,” “therapeutic capable agent,” or “treatment agent” are used interchangeably and refer to a molecule or compound that confers some beneficial effect upon administration to a subject. The beneficial effect includes enablement of diagnostic determinations; amelioration of a disease, symptom, disorder, or pathological condition; reducing or preventing the onset of a disease, symptom, disorder, or condition; and generally counteracting a disease, symptom, disorder or pathological condition.

[0265] The term “therapeutic effect” is art-recognized and refers to a local or systemic effect in animals, particularly mammals, and more particularly humans caused by a pharmacologically active substance.

[0266] The term “effective amount,” “effective dose,” or “effective dosage” is defined as an amount sufficient to achieve or at least partially achieve a desired effect. A “therapeutically effective amount” or “therapeutically effective dosage” of a drug or therapeutic agent is any amount of the drug that, when used alone or in combination with another therapeutic agent, promotes disease regression evidenced by a decrease in severity of disease symptoms, an increase in frequency and duration of disease symptom-free periods, or a prevention of impairment or disability due to the disease affliction. A “prophylactically effective amount” or a “prophylactically effective dosage” of a drug is an amount of the drug that, when administered alone or in combination with another therapeutic agent to a subject at risk of developing a disease or of suffering a recurrence of disease, inhibits the development or recurrence of the disease. The ability of a therapeutic or prophylactic agent to promote disease regression or inhibit the development or recurrence of the disease can be evaluated using a variety of methods known to the skilled practitioner, such as in human subjects during clinical trials, in animal model systems predictive of efficacy in humans, or by assaying the activity of the agent in in vitro assays.

[0267] Doses are often expressed in relation to bodyweight. Thus, a dose which is expressed as [g, mg, or other unit]/kg (or g, mg etc.) usually refers to [g, mg, or other unit] “per kg (or g, mg etc.) bodyweight,” even if the term “bodyweight” is not explicitly mentioned.

[0268] As used herein, the term “composition” or “pharmaceutical composition” refers to a mixture of at least one component useful within the disclosure with other components, such as carriers, stabilizers, diluents, dispersing agents, suspending agents, thickening agents, and/or excipients. The pharmaceutical composition facilitates administration of one or more components of this disclosure to an organism.

[0269] As used herein, the term “pharmaceutically acceptable” refers to a material, such as a carrier or diluent, which does not abrogate the biological activity or properties of the composition, and is relatively non-toxic, i.e., the material may be administered to an individual without causing undesirable biological effects or interacting in a deleterious manner with any of the components of the composition in which it is contained.

[0270] As used herein, the term “pharmaceutically acceptable carrier” includes a pharmaceutically acceptable salt, pharmaceutically acceptable material, composition or carrier, such as a liquid or solid filler, diluent, excipient, solvent or encapsulating material, involved in carrying or transporting a compound(s) of the present disclosure within or to the subject such that it may perform its intended function. Typically, such compounds are carried or transported from one organ, or portion of the body, to another organ, or portion of the body. Each salt or carrier must be “acceptable” in the sense of being compatible with the other ingredients of the formulation and not injurious to the subject. Some examples of materials that may serve as pharmaceutically acceptable carriers include: sugars, such as lactose, glucose, and sucrose; starches, such as corn starch and potato starch; cellulose, and its derivatives, such as sodium carboxymethyl cellulose, ethyl cellulose, and cellulose acetate; powdered tragacanth; malt; gelatin; talc; excipients, such as cocoa butter and suppository waxes; oils, such as peanut oil, cottonseed oil, safflower oil, sesame oil, olive oil, corn oil, and soybean oil; glycols, such as propylene glycol; polyols, such as glycerin, sorbitol, mannitol, and polyethylene glycol; esters, such as ethyl oleate and ethyl laurate; agar; buffering agents, such as magnesium hydroxide and aluminum hydroxide; alginic acid; pyrogen-free water; isotonic saline; Ringer's solution; ethyl alcohol; phosphate buffer solutions; diluent; granulating agent; lubricant; binder; disintegrating agent; wetting agent; emulsifier; coloring agent; release agent; coating agent; sweetening agent; flavoring agent; perfuming agent; preservative; antioxidant; plasticizer; gelling agent; thickener; hardener; setting agent; suspending agent; surfactant; humectant; carrier; stabilizer; and other non-toxic compatible substances employed in pharmaceutical formulations, or any combination thereof. As used herein, “pharmaceutically acceptable carrier” also includes any and all coatings, antibacterial and antifungal agents, and absorption delaying agents, and the like that are compatible with the activity of one or more components of this disclosure, and are physiologically acceptable to the subject. Supplementary active compounds may also be incorporated into the compositions.

[0271] “Combination” therapy, as used herein, unless otherwise clear from the context, is meant to encompass administration of two or more therapeutic agents in a coordinated fashion and includes, but is not limited to, concurrent dosing. Specifically, combination therapy encompasses both co-administration (e.g., administration of a co-formulation or simultaneous administration of separate therapeutic compositions) and serial or sequential administration, provided that administration of one therapeutic agent is conditioned in some way on the administration of another therapeutic agent. For example, one therapeutic agent may be administered only after a different therapeutic agent has been administered and allowed to act for a prescribed period of time. See, e.g., Kohrt et al. (2011) Blood 117:2423.

[0272] As used herein, the term “co-administration” or “co-administered” refers to the administration of at least two agent(s) or therapies to a subject. In some embodiments, the co-administration of two or more agents/therapies is concurrent. In other embodiments, a first agent/therapy is administered prior to a second agent/therapy. Those of skill in the art understand that the formulations and/or routes of administration of the various agents/therapies used may vary.

[0273] As used herein, the term “contacting,” when used in reference to any set of components, includes any process whereby the components to be contacted are mixed into the same mixture (for example, are added into the same compartment or solution), and does not necessarily require actual physical contact between the recited components. The recited components can be contacted in any order or any combination (or sub-combination) and can include situations where one or some of the recited components are subsequently removed from the mixture, optionally prior to addition of other recited components. For example, “contacting A with B and C” includes any and all of the following situations: (i) A is mixed with C, then B is added to the mixture; (ii) A and B are mixed into a mixture; B is removed from the mixture, and then C is added to the mixture; and (iii) A is added to a mixture of B and C.

[0274] “Sample,” “test sample,” and “patient sample” may be used interchangeably herein. The sample can be a sample of serum, urine plasma, amniotic fluid, cerebrospinal fluid, cells, or tissue. Such a sample can be used directly as obtained from a patient or can be pre-treated, such as by filtration, distillation, extraction, concentration, centrifugation, inactivation of interfering components, addition of reagents, and the like, to modify the character of the sample in some manner as discussed herein or otherwise as is known in the art. The terms “sample” and “biological sample” as used herein generally refer to a biological material being tested for and/or suspected of containing an analyte of interest such as antibodies. The sample may be any tissue sample from the subject. The sample may comprise protein from the subject.

[0275] As used herein, the term “in vitro” refers to events that occur in an artificial environment, e.g., in a test tube or reaction vessel, in cell culture, etc., rather than within a multi-cellular organism.

[0276] As used herein, the term “in vivo” refers to events that occur within a multi-cellular organism, such as a non-human animal.

[0277] As used herein, the singular forms “a,” “an,” and “the” include plural references unless the context clearly dictates otherwise.

[0278] As used herein, the terms “including,” “comprising,” “containing,” or “having” and variations thereof are meant to encompass the items listed thereafter and equivalents thereof as well as additional subject matter unless otherwise noted.

[0279] As used herein, the phrases “in one embodiment,” “in various embodiments,” “in some embodiments,” and the like are used repeatedly. Such phrases do not necessarily refer to the same embodiment, but they may unless the context dictates otherwise.

[0280] As used herein, the terms “and/or” or “/”′ means any one of the items, any combination of the items, or all of the items with which this term is associated.

[0281] As used herein, the word “substantially” does not exclude “completely,” e.g., a composition which is “substantially free” from Y may be completely free from Y. Where necessary, the word “substantially” may be omitted from the definition of this disclosure.

[0282] As used herein, the term “each,” when used in reference to a collection of items, is intended to identify an individual item in the collection but does not necessarily refer to every item in the collection. Exceptions can occur if explicit disclosure or context clearly dictates otherwise.

[0283] As used herein, the term “approximately” or “about,” as applied to one or more values of interest, refers to a value that is similar to a stated reference value. In some embodiments, the term “approximately” or “about” refers to a range of values that fall within 25%, 20%, 19%, 18%, 17%, 16%, 15%, 14%, 13%, 12%, 11%, 10%, 9%, 8%, 7%, 6%, 5%, 4%, 3%, 2%, 1%, or less in either direction (greater than or less than) of the stated reference value unless otherwise stated or otherwise evident from the context (except where such number would exceed 100% of a possible value). Unless indicated otherwise herein, the term “about” is intended to include values, e.g., weight percents, proximate to the recited range that are equivalent in terms of the functionality of the individual ingredient, the composition, or the embodiment.

[0284] As disclosed herein, a number of ranges of values are provided. It is understood that each intervening value, to the tenth of the unit of the lower limit, unless the context clearly dictates otherwise, between the upper and lower limits of that range is also specifically disclosed. Each smaller range between any stated value or intervening value in a stated range and any other stated or intervening value in that stated range is encompassed within the disclosure. The upper and lower limits of these smaller ranges may independently be included or excluded in the range, and each range where either, neither, or both limits are included in the smaller ranges is also encompassed within the disclosure, subject to any specifically excluded limit in the stated range. Where the stated range includes one or both of the limits, ranges excluding either or both of those included limits are also included in the disclosure.

[0285] The use of any and all examples, or exemplary language (e.g., “such as”) provided herein, is intended merely to better illuminate the invention and does not pose a limitation on the scope of this disclosure unless otherwise claimed. No language in the specification should be construed as indicating any non-claimed element as essential to the practice of this disclosure.

[0286] All methods described herein are performed in any suitable order unless otherwise indicated herein or otherwise clearly contradicted by context. In regard to any of the methods provided, the steps of the method may occur simultaneously or sequentially. When the steps of the method occur sequentially, the steps may occur in any order, unless noted otherwise. In cases in which a method comprises a combination of steps, each and every combination or sub-combination of the steps is encompassed within the scope of this disclosure, unless otherwise noted herein.

[0287] Each publication, patent application, patent, and other reference cited herein is incorporated by reference in its entirety to the extent that it is not inconsistent with the present disclosure. Publications disclosed herein are provided solely for their disclosure prior to the filing date of the present disclosure. Nothing herein is to be construed as an admission that the present disclosure is not entitled to antedate such publication by virtue of prior disclosure. Further, the dates of publication provided may be different from the actual publication dates, which may need to be independently confirmed.

[0288] It is understood that the examples and embodiments described herein are for illustrative purposes only and that various modifications or changes in light thereof will be suggested to persons skilled in the art and are to be included within the spirit and purview of this application and scope of the appended claims.

### F. Examples

### Example 1

[0289] This example describes the materials, methods, and instrumentation used in EXAMPLE 2.

### Study Participants

[0290] Previously enrolled study participants were asked to return for a 12-month follow-up visit at the Rockefeller University Hospital in New York from February 8 to Mar. 26, 2021. Eligible participants were adults with a history of participation in both prior study visits of the longitudinal cohort study of COVID-19 recovered individuals^{3,4}. All participants had a confirmed history of SARS-COV-2 infection, either diagnosed during the acute infection by RT-PCR or retrospectively confirmed by seroconversion. Exclusion criteria included the presence of symptoms suggestive of active SARS-COV-2 infection. Most study participants were residents of the Greater New York City tri-state region and were asked to return approximately 12 months after the time of onset of COVID-19 symptoms. Participants presented to the Rockefeller University Hospital for blood sample collection and were asked about potential symptom persistence since their 6.2-month study visit, laboratory-confirmed episodes of reinfection with SARS-COV-2, and whether they had received any COVID-19 related treatment or SARS-COV-2 vaccination in the interim. Detailed characteristics of the symptomology and severity of the acute infection, symptom kinetics, and the immediate convalescent phase (7 weeks post-symptom onset until 6.2 month visit) have been reported previously⁴. Participants that presented with persistent symptoms attributable to COVID-19 were identified on the basis of chronic shortness of breath or fatigue, deficit in athletic ability and/or three or more additional long-term symptoms such as persistent unexplained fevers, chest pain, new-onset cardiac sequalae, arthralgias, impairment of concentration/mental acuity, impairment of sense of smell/taste, neuropathy or cutaneous findings as previously described⁴. All participants at Rockefeller University provided written informed consent before participation in the study, and the study was conducted in accordance with Good Clinical Practice. For detailed participant characteristics, see Table 2.

### SARS-COV-2 Molecular Tests

[0291] Saliva was collected into guanidine thiocyanate buffer as described 39. RNA was extracted using either a column-based (Qiagen QIAmp DSP Viral RNA Mini Kit, Cat #61904) or a magnetic bead-based method as described⁴⁰. Reverse transcribed cDNA was amplified using primers and probes validated by the CDC or by Columbia University Personalized Medicine Genomics Laboratory respectively and approved by the FDA under the Emergency Use Authorization. Viral RNA was considered detected if Ct for two viral primers/probes were <40.

### Blood Samples Processing and Storage.

[0292] Peripheral Blood Mononuclear Cells (PBMCs) obtained from samples collected at Rockefeller University were purified as previously reported by gradient centrifugation and stored in liquid nitrogen in the presence of FCS and DMSO 3.4. Heparinized plasma and serum samples were aliquoted and stored at −20° C. or less. Prior to experiments, aliquots of plasma samples were heat-inactivated (56° ° C. for 1 hour) and then stored at 4° C.

### ELISAs

[0293] ELISAs^{41,42} to evaluate antibodies binding to SARS-COV-2 RBD and N were performed by coating high-binding 96-half-well plates (Corning 3690) with 50 μl per well of a 1 μg/ml protein solution in PBS overnight at 4° C. Plates were washed 6 times with washing buffer (1×PBS with 0.05% Tween-20 (Sigma-Aldrich)) and incubated with 170 μl per well blocking buffer (1×PBS with 2% BSA and 0.05% Tween-20 (Sigma)) for 1 h at room temperature. Immediately after blocking, monoclonal antibodies or plasma samples were added in PBS and incubated for 1 h at room temperature. Plasma samples were assayed at a 1:66 starting dilution and 7 additional threefold serial dilutions. Monoclonal antibodies were tested at 10 μg/ml starting concentration and 10 additional fourfold serial dilutions. Plates were washed 6 times with washing buffer and then incubated with anti-human IgG, IgM or IgA secondary antibody conjugated to horseradish peroxidase (HRP) (Jackson Immuno Research 109-036-088 109-035-129 and Sigma A0295) in blocking buffer at a 1:5,000 dilution (IgM and IgG) or 1:3,000 dilution (IgA). Plates were developed by addition of the HRP substrate, TMB (ThermoFisher) for 10 min (plasma samples) or 4 minutes (monoclonal antibodies). The developing reaction was stopped by adding 50 μl 1 M H₂SO₄. and absorbance was measured at 450 nm with an ELISA microplate reader (FluoStar Omega, BMG Labtech) with Omega and Omega MARS software for analysis. For plasma samples, a positive control (plasma from participant COV72, diluted 66.6-fold and seven additional threefold serial dilutions in PBS) was added to every assay plate for validation. The average of its signal was used for normalization of all of the other values on the same plate with Excel software before calculating the area under the curve using Prism V9.1 (GraphPad). For monoclonal antibodies, the EC50 was determined using four-parameter nonlinear regression (GraphPad Prism V9.1).

### Proteins

[0294] Mammalian expression vectors encoding the RBDs of SARS-COV-2 (GenBank MN985325.1; S protein residues 319-539) or K417N, E484K, N501Y RBD mutants with an N-terminal human IL-2 or Mu phosphatase signal peptide were previously described⁴³. SARS-COV-2 Nucleocapsid protein (N) was purchased from Sino Biological (40588-V08B).

### SARS-COV-2 Pseudotyped Reporter Virus

[0295] A panel of plasmids expressing RBD-mutant SARS-COV-2 spike proteins in the context of pSARS-COV-2-S_{Δ19} has been described previously^{2,9,23}. Variant pseudoviruses resembling variants of concern B.1.1.7 (first isolated in the UK), B.1.351 (first isolated in South-Africa), and B.1.526 (first isolated in New York City) were generated by introduction of substitutions using synthetic gene fragments (IDT) or overlap extension PCR mediated mutagenesis and Gibson assembly. Specifically, the variant-specific deletions and substitutions introduced were:
[0296] B.1.1.7: ΔH69/V70, ΔY144, N501Y, A470D, D614G, P681H, T761I, S982A, D118H
[0297] B.1.351: D80A, D215G, L242H, R246I, K417N, E484K, N501Y, D614G, A701V
[0298] B.1.526: L5F, T95I, D253G, E484K, D614G, A701V.

[0299] The E484K and K417N/E484K/N501Y (KEN) substitution, as well as the deletions/substitutions corresponding to variants of concern, were incorporated into a spike protein that also includes the R683G substitution, which disrupts the furin cleavage site and increases particle infectivity. Neutralizing activity against mutant pseudoviruses was compared to a wildtype SARS-COV-2 spike sequence (NC_045512), carrying R683G where appropriate.

[0300] SARS-COV-2 pseudotyped particles were generated as previously described 3.10. Briefly, 293T cells were transfected with pNL4-3ΔEnv-nanoluc and pSARS-COV-2-S_{Δ19}, particles were harvested 48 h post transfection, filtered, and stored at −80° C.

### Pseudotyped Virus Neutralization Assay

[0301] Fourfold serially diluted plasma from COVID-19-convalescent individuals or monoclonal antibodies were incubated with SARS-COV-2 pseudotyped virus for 1 h at 37° C. The mixture was subsequently incubated with 293T_{Ace2} cells³ (for comparisons of plasma or monoclonal antibodies from convalescent individuals) or HT1080Ace2 cl14 cells¹⁰ (for analyses involving mutant/variant pseudovirus panels), as indicated, for 48 h after which cells were washed with PBS and lysed with Luciferase Cell Culture Lysis 5× reagent (Promega). Nanoluc Luciferase activity in lysates was measured using the Nano-Glo Luciferase Assay System (Promega) with the Glomax Navigator (Promega). The obtained relative luminescence units were normalized to those derived from cells infected with SARS-COV-2 pseudotyped virus in the absence of plasma or monoclonal antibodies. The half-maximal neutralization titers for plasma (NT₅₀) or half-maximal and 90% inhibitory concentrations for monoclonal antibodies (IC₅₀ and IC₉₀) were determined using four-parameter nonlinear regression (least-squares regression method without weighting; constraints: top=1, bottom=0) (GraphPad Prism).

### Biotinylation of Viral Protein for Use in Flow Cytometry

[0302] Purified and Avi-tagged SARS-COV-2 RBD or SARS-COV-2 RBD KEN mutant (K417N, E484K, N501Y) was biotinylated using the Biotin-Protein Ligase-BIRA kit according to the manufacturer's instructions (Avidity) as described before 3. Ovalbumin (Sigma, A5503-1G) was biotinylated using the EZ-Link Sulfo-NHS-LC-Biotinylation kit according to the manufacturer's instructions (Thermo Scientific). Biotinylated ovalbumin was conjugated to streptavidin-BV711 (BD biosciences, 563262) and RBD to streptavidin-PE (BD Biosciences, 554061) and streptavidin-AF647 (Biolegend, 405237)³.

### Flow Cytometry and Single Cell Sorting

[0303] Single-cell sorting by flow cytometry was described previously 3. Peripheral blood mononuclear cells were enriched for B cells by negative selection using a pan-B-cell isolation kit according to the manufacturer's instructions (Miltenyi Biotec, 130-101-638). The enriched B cells were incubated in FACS buffer (1×PBS, 2% FCS, 1 mM EDTA) with the following anti-human antibodies (all at 1:200 dilution): anti-CD20-PECy7 (BD Biosciences, 335793), anti-CD3-APC-eFluro 780 (Invitrogen, 47-0037-41), anti-CD8-APC-eFluor 780 (Invitrogen, 47-0086-42), anti-CD16-APC-eFluor 780 (Invitrogen, 47-0168-41), anti-CD14-APC-eFluor 780 (Invitrogen, 47-0149-42), as well as Zombie NIR (BioLegend, 423105) and fluorophore-labelled RBD and ovalbumin (Ova) for 30 min on ice. Single CD3-CD8-CD14-CD16-CD20+Ova-RBD-PE+RBD-AF647+B cells were sorted into individual wells of 96-well plates containing 4 μl of lysis buffer (0.5×PBS, 10 mM DTT, 3,000 units/ml RNasin Ribonuclease Inhibitors (Promega, N2615) per well using a FACS Aria III and FACSDiva software (Becton Dickinson) for acquisition and FlowJo for analysis. The sorted cells were frozen on dry ice and then stored at −80° C. or immediately used for subsequent RNA reverse transcription. For B cell phenotype analysis, in addition to the above antibodies, B cells were also stained with the following anti-human antibodies: anti-IgD-BV421 (Biolegend, 348226), anti-CD27-FITC (BD biosciences, 555440), anti-CD19-BV605 (Biolegend, 302244), anti-CD71-PerCP-Cy5.5 (Biolegend, 334114), anti-IgG-PECF594 (BD biosciences, 562538), anti-IgM-AF700 (Biolegend, 314538), anti-IgA-Viogreen (Miltenyi Biotec, 130-113-481).

### Antibody Sequencing, Cloning, and Expression

[0304] Antibodies were identified and sequenced as described previously 3. In brief, RNA from single cells was reverse-transcribed (SuperScript III Reverse Transcriptase, Invitrogen, 18080-044), and the cDNA was stored at −20° C. or used for subsequent amplification of the variable IGH, IGL, and IGK genes by nested PCR and Sanger sequencing. Sequence analysis was performed using MacVector. Amplicons from the first PCR reaction were used as templates for sequence- and ligation-independent cloning into antibody expression vectors. Recombinant monoclonal antibodies were produced and purified as previously described 3.

### Biolayer Interferometry

[0305] Biolayer interferometry assays were performed as previously described 3. The Octet Red instrument (ForteBio) was used at 30° C. with shaking at 1,000 r.p.m. Epitope-binding assays were performed with protein A biosensor (ForteBio 18-5010), following the manufacturer's protocol ‘classical sandwich assay.’ (1) Sensor check: sensors immersed 30 s in buffer alone (kinetics buffer 10× ForteBio 18-1105 diluted 1× in PBS1×). (2) Capture the first antibody: sensors immersed 10 min with Ab1 at 30 μg/ml. (3) Baseline: sensors immersed 30 s in buffer alone. (4) Blocking: sensors immersed 5 min with IgG isotype control at 50 μg/ml. (6) Antigen association: sensors immersed 5 min with RBD at 100 μg/ml. (7) Baseline: sensors immersed 30 s in buffer alone. (8) Association Ab2: sensors immersed 5 min with Ab2 at 30 μg/ml. Curve fitting was performed using the Fortebio Octet Data analysis software (ForteBio). Affinity measurements of anti-SARS-CoV-2 IgGs binding were corrected by subtracting the signal obtained from traces performed with IgGs in the absence of WT RBD. The kinetic analysis using protein A biosensor (ForteBio 18-5010) was performed as follows: (1) baseline: 60 sec immersion in buffer. (2) loading: 200 sec immersion in a solution with IgGs 30 μg/ml. (3) baseline: 200 sec immersion in buffer. (4) Association: 300 sec immersion in solution with WT RBD at 200, 100, 50 or 25 μg/ml (5) dissociation: 600 sec immersion in buffer. Curve fitting was performed using a fast 1:1 binding model and the Data analysis software (ForteBio). Mean K_{D} values were determined by averaging all binding curves that matched the theoretical fit with an R² value≥0.8.

### Computational Analyses of Antibody Sequences

[0306] Antibody sequences were trimmed based on quality and annotated using Igblastn v.1.14. with IMGT domain delineation system. Annotation was performed systematically using Change-O toolkit v.0.4.540⁴⁴. Heavy and light chains derived from the same cell were paired, and clonotypes were assigned based on their V and J genes using in-house R and Perl scripts (FIG. 2D). All scripts and the data used to process antibody sequences are publicly available on GitHub (https://github.com/stratust/igpipeline).

[0307] The frequency distributions of human V genes in anti-SARS-COV-2 antibodies from this study were compared to 131,284,220 IgH and IgL sequences generated by +5 and downloaded from cAb-Rep⁴⁶, a database of human shared BCR clonotypes available at https://cab-rep.c2b2.columbia.edu/. Based on the 91 distinct V genes that make up the 6902 analyzed sequences from Ig repertoire of the 10 participants present in this study, the IgH and IgL sequences were selected from the database that are partially coded by the same V genes and counted them according to the constant region. The frequencies shown in (FIG. 9) are relative to the source and isotype analyzed. The two-sided binomial test was used to check whether the number of sequences belonging to a specific IgHV or IgL V gene in the repertoire is different according to the frequency of the same IgV gene in the database. Adjusted p-values were calculated using the false discovery rate (FDR) correction. Significant differences are denoted with stars.

[0308] Nucleotide somatic hypermutation and CDR3 length were determined using in-house R and Perl scripts. For somatic hypermutations, IGHV and IGLV nucleotide sequences were aligned against their closest germlines using Igblastn, and the number of differences were considered nucleotide mutations. The average mutations for V genes were calculated by dividing the sum of all nucleotide mutations across all participants by the number of sequences used for the analysis. To calculate the GRAVY scores of hydrophobicity⁴⁷, used Guy H. R. Hydrophobicity scale was used based on free energy of transfer (kcal/mole)⁴⁸ implemented by the R package Peptides (the Comprehensive R Archive Network repository; https://journal.r-project.org/archive/2015/RJ-2015-001/RJ-2015-001.pdf). 2680 heavy chain CDR3 amino acid sequences from this study and 22,654,256 IGH CDR3 sequences from the public database of memory B cell receptor sequences were used⁴⁹. The two-tailed Wilcoxon matched-pairs signed rank test was used to test whether there is a difference in hydrophobicity distribution.

[0309] Immunoglobulins grouped into the same clonal lineage had their respective IgH and IgL sequences merged and subsequently aligned, using TranslatorX⁵⁰, with the unmutated ancestral sequence obtained from IMGT/V-QUEST reference directory⁵¹. GCTree⁵² was further used to perform the phylogenetic trees construction. Each node represents a unique IgH and IgL combination, and the size of each node is proportional to the number of identical sequences. The numbered nodes represent the unobserved ancestral genotypes between the germline sequence and the sequences on the downstream branch.

### Example 2

[0310] Immune responses to SARS-COV-2 were initially characterized in a cohort of convalescent individuals 1.3 and 6.2 months after infection^{3,4}. Between Feb. 8 and Mar. 26, 2021, 63 participants returned for a 12-month follow-up visit, among whom 26 (41%) had received at least one dose of either the Moderna (mRNA-1273) or Pfizer-BioNTech (BNT162b2) vaccines, on average 40 days before their study visit (Table 1). Of the individuals that returned for a 12-month follow-up, 10% had been hospitalized, and the remainder had experienced relatively mild initial infections. Only 14% of the individuals reported persistent long-term symptoms after 12 months, reduced from 44% at the 6-month time point⁴. Symptom persistence was not associated with the duration and severity of acute disease or with vaccination status (FIGS. 6A-C). All participants tested negative for active infection at the 12-month time point as measured by a saliva-based PCR assay⁴. The demographics and clinical characteristics of the participants are shown in Tables 1 and 2.

### Plasma SARS-COV-2 Antibody Reactivity

[0311] Antibody reactivity in plasma to the RBD and nucleoprotein (N) were measured by enzyme-linked immunosorbent assay (ELISA)³. Convalescent participants who had not been vaccinated maintained most of their anti-RBD IgM (103%), IgG (88%), and IgA (72%) titers between 6 and 12 months (FIGS. 1A and 7A-H). Vaccination increased the anti-RBD plasma antibody levels, with IgG titers increasing by nearly 5-fold compared to unvaccinated individuals (FIG. 1A right). The 2 individuals who did not show an increase had been vaccinated only 2 days before sample collection. In contrast to anti-RBD antibody titers that were relatively stable, anti-N antibody titers decreased significantly between 6 and 12 months irrespective of vaccination (FIG. 1B). Thus, persistence of humoral immunity to individual SARS-COV-2 viral antigens differs, favoring longevity of anti-RBD over anti-N responses.

[0312] Plasma neutralizing activity in 63 participants was measured using an HIV-1 pseudotyped with the SARS-COV-2 spike protein^{3,4,10} (FIG. 1C-E). Twelve months after infection, the geometric mean half-maximal neutralizing titer (NT₅₀) for the 37 individuals that had not been vaccinated was 75, which was not significantly different from the same individuals at 6.2 months (FIG. 1D). In contrast, the vaccinated individuals showed a geometric mean NT₅₀ of 3,684, which was nearly 50-fold greater than unvaccinated individuals and disproportionately increased compared to anti-RBD IgG antibodies (FIGS. 1A, 1D, and 1E). Neutralizing activity was directly correlated with IgG anti-RBD (FIG. 7I) but not with anti-N titers (FIG. 7K). It was concluded that neutralizing titers remain relatively unchanged between 6 to 12 months after SARS-COV-2 infection and that vaccination further boosts this activity by nearly 50-fold.

[0313] To determine the neutralizing activity against circulating variants of concern/interest, neutralization assays were performed on HIV-1 virus pseudotyped with the S protein of the following SARS-COV-2 variants of concern/interest: B.1.1.7, B.1.351, B.1.526^{1,11,12}. Twelve months after infection, neutralizing activity against the variants was generally lower than against wild-type SARS-COV-2 virus in the same assay with the greatest loss of activity against B.1.351 (FIG. 1F). After vaccination the geometric mean NT50 rose to 11,493, 48,341 and 22,109 against B.1.351, B.1.1.7 and B.1.526, respectively. These titers are an order of magnitude higher than the neutralizing titers achieved against the wild-type SARS-COV-2 at the peak of the initial response in infected individuals and in naïve individuals receiving both doses of mRNA vaccines (FIG. 1D).

### Memory B Cells

[0314] The memory B cell compartment serves as an immune reservoir that contains a diverse collection of antibodies^{13,14}. To enumerate RBD-specific memory B cells, flow cytometry was performed using a biotin-labeled RBD³ (FIG. 2A upper panel, FIGS. 8A and 8B). In the absence of vaccination, the number of RBD-specific memory B cells present at 12 months was only 1.35-fold lower than the earlier timepoint (p=0.027, FIG. 2B). In contrast, convalescent individuals that received mRNA vaccines showed an average 8.6-fold increase in the number of circulating RBD-specific memory B cells (FIG. 2B). B cells expressing antibodies that bound to both wild-type and K417N/E484K/N501Y mutant RBDs were also enumerated by flow cytometry (FIG. 2A lower panel, FIG. 8C). The number of variant RBD cross-reactive B cells was directly proportional to but 1.6 to 3.2-fold lower than wild-type RBD binding B cells (FIG. 2B).

[0315] The memory B cell compartment accumulates mutations and undergoes clonal evolution over the initial 6 months after infection^{4,9,16,17}. To determine whether the memory compartment continues to evolve between 6 and 12 months, 1105 paired antibody heavy and light chain sequences were obtained from 10 individuals that were also assayed at the earlier time points, 6 of which were vaccinated (FIG. 2C, FIG. 8D, Table 3). There were few significant differences among the expressed IGHV and IGLV genes between vaccinated and unvaccinated groups, or between the 1.3-, 6-month, and 1 year time points (FIGS. 9A-C)^{3,4}. IGHV3-30 and IGHV3-53 remained over-represented irrespective of vaccination^{18,19} (FIG. 9A).

[0316] All individuals assayed at 12 months showed expanded clones of RBD-binding memory cells that expressed closely related IGHV and IGLV genes (FIGS. 2C and 2D, FIG. 8D). The relative fraction of cells belonging to these clones varied from 7-54% of the repertoire, with no significant difference between vaccinated and non-vaccinated groups. The overall clonal composition differed between 6 and 12 months in all individuals suggesting ongoing clonal evolution (FIG. 2C and FIG. 8D). Among the 89 clones found after 12 months, 61% were not previously detected, and 39% were present at one of the earlier time points (FIG. 2C and FIG. 8D). In vaccinated individuals, the increase in size of the memory compartment was paralleled by an increase in the absolute number of B cells representing all persistent clones (FIG. 2B-2E and FIG. 10A). Thus, RBD-specific memory B cell clones were re-expanded upon vaccination in all 6 convalescent individuals examined (FIGS. 2C-2E, FIG. 8D, and FIG. 10A).

[0317] Somatic hypermutation of antibody genes continued between 6 and 12 months after infection (FIG. 2F). Slightly higher levels of mutation were found in individuals who had not been vaccinated compared to vaccinated individuals, possibly due to recruitment of newly-formed memory cells into the expanded memory compartment of the vaccinated individuals (FIGS. 2C-E and 10B). There was no significant difference in mutation between conserved and newly arising clones at the 12-month time point in vaccinated individuals (FIG. 10C). Moreover, phylogenetic analysis revealed that sequences found at 6 and 12 months were intermingled and similarly distant from their unmutated common ancestors (FIG. 11). It was concluded that clonal re-expansion of memory cells in response to vaccination is not associated with additional accumulation of large numbers of somatic mutations as might be expected if the clones were re-entering and proliferating in germinal centers.

### Neutralizing Activity of Monoclonal Antibodies

[0318] To determine whether the antibodies obtained from memory B cells 12 months after infection bind to RBD, ELISAs were performed (FIG. 3A). 174 antibodies were tested by ELISA including: 1. 53 that were randomly selected from those that appeared only once and only after 1 year; 2. 91 that appeared as expanded clones or singlets at more than one time point; 3. 30 representatives of newly arising expanded clones (Tables 3 and 4). Among the 174 antibodies tested, 173 bound to RBD, indicating that the flow cytometry method used to identify B cells expressing anti-RBD antibodies was efficient (Tables 3 and 4). The geometric mean ELISA half-maximal concentration (EC₅₀) of the antibodies obtained after 12 months was 2.6 ng/ml, which was significantly lower than at 6 months irrespective of vaccination and suggestive of an increase in affinity (FIG. 3A and FIGS. 12A-B and Tables 3 and 4).

[0319] All 174 RBD binding antibodies obtained from the 12-month time point were tested for neutralizing activity in a SARS-COV-2 pseudotype neutralization assay. When compared to the earlier time points from the same individuals, the geometric mean half-maximal inhibitory concentration (IC₅₀) improved from 171 ng/ml (1.3 months) to 116 ng/ml (6 months) to 79 ng/ml (12 months), with no significant difference between vaccinated and non-vaccinated individuals (FIGS. 3B and 12C, Table 3). The increased potency was especially evident in the antibodies expressed by expanded clones of B cells that were conserved for the entire observation period irrespective of vaccination (p=0.014, FIG. 3B right and 3C, FIG. 12E and Table 4). The overall increase in neutralizing activity among conserved clones was due to the accumulation of clones expressing antibodies with potent neutralizing activity and simultaneous loss of clones expressing antibodies with no measurable activity (p=0.028, FIG. 3b right pie charts). Consistent with this observation, antibodies obtained from clonally expanded B cells after 12 months were more potent than antibodies obtained from unique B cells at the same time point (p=0.029, FIG. 3B).

### Epitopes and Breadth of Neutralization

[0320] To determine whether the loss of non-neutralizing antibodies over time was due to preferential loss of antibodies targeting specific epitopes, BLI experiments were performed in which a preformed antibody-RBD complex was exposed to a second monoclonal targeting one of 3 classes of structurally defined epitopes^{3,20} (see schematic in FIG. 4A). 60 randomly selected antibodies were assayed with comparable neutralizing activity from the 1.3- and 12-month time points. The 60 antibodies were evenly distributed between the 2 time points and between neutralizers and non-neutralizers (FIG. 4). Antibody affinities for RBD were similar among neutralizers and non-neutralizers obtained at the same time point (FIG. 4B and FIG. 12). Although the differences were small, both neutralizers and non-neutralizers showed increased affinity over time (FIG. 4B and FIG. 12). In competition experiments, all but 2 of the 30 non-neutralizing antibodies failed to inhibit binding of the class 1 (C105), 2 (C121 and C144) or 3 (C135) antibodies tested and therefore must bind to epitopes that do not overlap with the epitopes of these classes of antibodies (FIGS. 4C and 14). In contrast, all but 2 of the 30 neutralizers blocked class 1, or 2 antibodies whose target epitopes are structural components of the RBD that interact with its cellular receptor, the angiotensin-converting enzyme 2^{20,21} (ACE2) (FIGS. 4C and 14). In addition, whereas 9 of the 15 neutralizing antibodies obtained after 1.3 months blocked both class 1 and 2 antibodies, only 1 of the 15 obtained after 12 months did so. In contrast to the earlier time point, 13 of 15 neutralizing antibodies obtained after 12 months only interfered with C121, a class 2 antibody^{3,20} (FIGS. 4C and 14). It was concluded that neutralizing antibodies are retained and non-neutralizing antibodies targeting RBD surfaces that do not interact with ACE2 are removed from the repertoire over time.

[0321] To determine whether there was an increase in neutralization breadth over time, the neutralizing activity of the 60 antibodies was assayed against a panel of RBD mutants covering residues associated with circulating variants of concern: R346S, K417N, N440K, A475V, E484K, and N501Y (FIG. 4D and Table 5). Increased activity was evident against K417N, N440K, A475V, E484K, and N501Y (FIG. 4D and Table 5). It was concluded that evolution of the antibody repertoire results in acquisition of neutralization breadth over time.

[0322] The increase in breadth and overall potency of memory B cell antibodies could be due to shifts in the repertoire, clonal evolution, or both. To determine whether changes in specific clones are associated with increases in affinity and breadth, the relative affinity and neutralizing breadth of pairs of antibodies expressed by expanded clones of B cells that were maintained in the repertoire over the entire observation period were measured 3.4. SARS-COV-2 neutralizing activity was not significantly correlated with affinity at either time point considered independently (FIG. 5A). However, there was a significant increase in overall affinity over time, including in the 4 pairs of antibodies with no measurable neutralizing activity (FIG. 5B and Table 6). Neutralizing breadth was assayed for 15 randomly selected pairs of antibodies targeting epitopes assigned to the 3 dominant classes of neutralizing antibodies^{3,20,22,23}. Seven of the selected antibodies showed equivalent or decreased activity against wild-type SARS-COV-2 after 12 months (FIG. 5C and Table 7). However, neutralizing breadth increased between 1.3 and 12-months for all 15 pairs, even when neutralizing activity against the wild-type was unchanged or decreased (FIG. 5C and Table 7). Only 1 of the 15 antibodies obtained after 1.3 months neutralized all the mutants tested (FIG. 5C). In contrast, 10 of the 15 antibodies obtained from the same clones after 12 months neutralized all variants tested with IC₅₀s as low as 1 ng/ml against the triple mutant K417N/E484K/N501Y found in B.1.351 (FIG. 5C and Table 7). In conclusion, continued clonal evolution of anti-SARS-COV-2 antibodies over 12 months favors increasing potency and breadth, resulting in monoclonal antibodies with exceptional activity against a broad group of variants.

### Discussion

[0323] Over one year after its inception, the coronavirus disease-2019 (COVID-19) pandemic caused by severe acute respiratory syndrome coronavirus-2 (SARS-COV-2) remains difficult to control despite the availability of several excellent vaccines. Progress in controlling the pandemic is slowed by the emergence of variants that appear to be more transmissible and more resistant to antibodies^{1,2}. This disclosure provides the results of a study on a cohort of 63 COVID-19-convalescent individuals assessed at 1.3, 6.2, and 12 months after infection, 41% of whom also received mRNA vaccines^{3,4}. In the absence of vaccination antibody reactivity to the receptor binding domain (RBD) of SARS-COV-2, neutralizing activity and the number of RBD-specific memory B cells remain relatively stable from 6 to 12 months. Vaccination increases all components of the humoral response, and as expected, results in serum neutralizing activities against variants of concern that are comparable to or greater than neutralizing activity against the original Wuhan Hu-1 achieved by vaccination of naïve individuals^{2,5-8} The mechanism underlying these broad-based responses involves ongoing antibody somatic mutation, memory B cell clonal turnover, and development of monoclonal antibodies that are exceptionally resistant to SARS-CoV-2 RBD mutations, including those found in variants of concern^{4,9}. In addition, B cell clones expressing broad and potent antibodies are selectively retained in the repertoire over time and expand dramatically after vaccination. The data suggest that immunity in convalescent individuals will be very long lasting and that convalescent individuals who receive available mRNA vaccines will produce antibodies and memory B cells that should be protective against circulating SARS-CoV-2 variants.

[0324] During immune responses, activated B cells interact with cognate T cells and begin dividing before selection into the plasma cell, memory or germinal center B cell compartments based in part on their affinity for antigen. Whereas B cells expressing high affinity antibodies are favored to enter the long-lived plasma cell compartment, the memory compartment is more diverse and can develop directly from activated B cells or from a germinal center. Memory cells emanating from a germinal center carry more mutations than those that develop directly from activated B cells because they undergo additional cycles of division.

[0325] Consistent with the longevity of bone marrow plasma cells, infection with SARS-COV-2 leads to persistent serum anti-RBD antibodies and corresponding neutralizing responses. Nearly 93% of the plasma neutralizing activity is retained between 6- and 12-months. Vaccination boosts the neutralizing response by 1.5 orders of magnitude by inducing additional plasma cell differentiation from the memory B cell compartment. Recruitment of evolved memory B cells producing antibodies with broad and potent neutralizing activity into the plasma cell compartment accounts for the exceptional serologic activity of vaccinated convalescents against variants of concern.

[0326] Less is known about selection and maintenance of the memory B cell compartment. SARS-CoV-2 infection produces a memory compartment that continues to evolve over 12 months after infection with accumulation of somatic mutations, emergence of new clones, and increasing affinity all of which is consistent with long-term persistence of germinal centers. The increase in activity against SARS-COV-2 mutants parallels the increase in affinity and is consistent with the finding that increasing the apparent affinity of anti-SARS-2 antibodies by dimerization or by creating bi-specific antibodies also increases resistance to RBD mutations³⁴⁻³⁷.

[0327] Continued antibody evolution in germinal centers requires antigen, which can be retained in these structures over long periods of time²⁶. In addition, SARS-COV-2 protein and nucleic acid have been reported in the gut for at least 2 months after infection⁴. Irrespective of the source of antigen, antibody evolution favors epitopes overlapping with the ACE2 binding site on the RBD, possibly because these are epitopes that are preferentially exposed on trimeric spike protein or virus particles.

[0328] Vaccination after SARS-COV-2 infection increases the number of RBD binding memory cells by over an order of magnitude by recruiting new B cell clones into memory and expanding persistent clones. The persistent clones expand without accumulating large numbers of additional mutations indicating that clonal expansion of human memory B cells does not require re-entry into germinal centers and occurs through the activated B cell compartment 14.24-28

[0329] The remarkable evolution of breadth after infection and the robust enhancement of serologic responses and B cell memory achieved with mRNA vaccination indicates that convalescent individuals who are vaccinated should enjoy high levels of protection against emerging variants without a need to modify existing vaccines.

TABLE 1
Cohort characteristics

| | | | | | | | | Temporal dynamics (days) | | |
|---|---|---|---|---|---|---|---|---|---|---|
| | | | | | | | | Duration | | Sx onset to |
| | | | Age | | | | | of acute | | inital visit |
| | | n | (years) | | Sex (F/M) | | | Sx | | (1.3 m) |
| Vaccinated | | 26 | 49 | | 12/14 | | | 12 | | 37.5 |
| | | | (26-73) | | | | | (2-26) | | (17-67) |
| Unvaccinated | | 37 | 45 | | 15/22 | | | 12 | | 36 |
| | | | (30-63) | | | | | (2-28) | | (23-63) |
| | | Temporal dynamics (days) | | | | | | | | |
| | | Sx onset to | Time | | | | | Post-acute Sx | | |
| | | follow-up | between | | Acute disease severity | | | persistence † | | |
| | | visit (1 y) | visits | | by WHO (0-8) ¶ | | | at 6.2 m | | At 1 y |
| Vaccinated | | 355 | 316 | | 2 | | | 9 (34%) | | 3 (12%) |
| | | (330-368) | (294-346) | | (0-5) | | | | | |
| Unvaccinated | | 350 | 313 | | 2 | | | 18 (49%) | | 6 (16%) |
| | | (327-379) | (292-345) | | (0-4) | | | | | |
| Vaccination status | | | | | | | | | | |
| Vaccine | | | First dose | | | | | | | |
| platform | | | to 1 y | | ELISA binding | | | | | |
| (Moderna: | | | study | | RBD (AUC) | | | | | |
| Pfizer- | | 2 doses | visit | | IgG | | IgG | IgG | | IgM |
| BioNTech) | | received | (days) | | (1.3 m) | | (6.2 m) | (1 y) | | (1.3 m) |
| | | 18/26 | (2-82) | | 9196 | | | 36303 | | 2282 |
| — | | — | — | | 11979 | | | 5987 | | 2495 |
| ELISA binding | | | | | | | | | | |
| RBD (AUC) | | | | | N (AUC) | | | Neutralization | | |
| IgM | IgM | IgA | IgA | IgA | IgG | IgG | IgG | (NT50) | | |
| (6.2 m) | (1 y) | (1.3 m) | (6.2 m) | (1 y) | (1.3 m) | (6.2 m) | (1 y) | (1.3 m) | (6.2 m) | (1 y) |
| | 3054 | 1092 | | 3288 | 17619 | | 5894 | 530 | | 3722 |
| | 1467 | 1546 | | 881 | 18030 | | 4870 | 425 | | 65 |

Sx = Symptoms
¶ = WHO Ordinal Scale for Clinical Imporvement, COVID-19 Trial Design
† = Persistent fatigue, dyspnea, athletic deficit, or ≥3 other solicited symptoms beyond 6 weeks from Sx onset
Reported data are median (range) unless stated otherwise

TABLE 2
Individual participant characteristics

| | | | | | | Temporal dynamics (days) | | | |
|---|---|---|---|---|---|---|---|---|---|
| | | | | | | | Sx onset | Sx | Acute |
| | | | | | # of | Duration | to initial | onset to | disease |
| | Age | | | | solicited | of acute | visit | follow-up | severity by |
| ID | (years) | Sex | Race | Ethnicity | comorbidities § | Sx | (1.3 m) | visit (1 y) | WHO (0-8) ¶ |
| 7 | 40 | M | White | Non-Hispanic | 0 | 11 | 30 | 376 | 2 |
| 8 | 37 | M | White | Non-Hispanic | 0 | 3 | 57 | 370 | 2 |
| 9 | 35 | F | White | Non-Hispanic | 0 | 11 | 53 | 366 | 2 |
| 20 | 26 | F | White | Non-Hispanic | 1 | 2 | 17 | 345 | 2 |
| 21 | 54 | M | White | Hispanic | 1 | 11 | 27 | 340 | 2 |
| 24 | 34 | M | White | Non-Hispanic | 1 | 9 | 30 | 336 | 1 |
| 31 | 51 | M | White | Non-Hispanic | 0 | 9 | 33 | 350 | 2 |
| 38 | 57 | F | White | Non-Hispanic | 0 | 10 | 38 | 337 | 2 |
| 40 | 44 | M | White | Non-Hispanic | 0 | 7 | 23 | 345 | 2 |
| 46 | 39 | M | White | Non-Hispanic | 0 | 8 | 30 | 337 | 2 |
| 47 | 43 | F | White | Non-Hispanic | 0 | 11 | 33 | 340 | 2 |
| 55 | 36 | M | White | Non-Hispanic | 0 | 3 | 49 | 349 | 2 |
| 57 | 66 | M | White | Non-Hispanic | 4 | 6 | 21 | 341 | 2 |
| 71 | 45 | F | White | Non-Hispanic | 0 | 12 | 48 | 386 | 2 |
| 72 | 42 | M | White | Non-Hispanic | 1 | 16 | 35 | 352 | 2 |
| 75 | 46 | F | White | Non-Hispanic | 0 | 10 | 36 | 340 | 1 |
| 76 | 49 | F | White | Non-Hispanic | 0 | 28 | 34 | 379 | 1 |
| 88 | 41 | M | White | Non-Hispanic | 1 | 7 | 23 | 341 | 1 |
| 96 | 48 | F | White | Non-Hispanic | 0 | 9 | 30 | 359 | 1 |
| 98 | 35 | F | White | Non-Hispanic | 0 | 2 | 24 | 343 | 2 |
| 99 | 36 | F | White | Non-Hispanic | 0 | 13 | 29 | 360 | 2 |
| 107 | 53 | F | White | Non-Hispanic | 0 | 10 | 29 | 342 | 2 |
| 114 | 30 | F | White | Non-Hispanic | 0 | 15 | 36 | 335 | 2 |
| 115 | 65 | F | White | Non-Hispanic | 0 | 20 | 41 | 335 | 2 |
| 119 | 56 | M | White | Non-Hispanic | 0 | 13 | 48 | 375 | 1 |
| 120 | 56 | F | White | Non-Hispanic | 0 | 26 | 48 | 375 | 1 |
| 125 | 51 | F | White | Non-Hispanic | 0 | 10 | 26 | 333 | 1 |
| 131 | 39 | M | White | Non-Hispanic | 0 | 5 | 25 | 338 | 0 |
| 134 | 27 | F | White | Non-Hispanic | 0 | 16 | 22 | 330 | 0 |
| 135 | 62 | F | White | Non-Hispanic | 0 | 8 | 31 | 341 | 2 |
| 140 | 63 | F | White | Non-Hispanic | 0 | 28 | 47 | 343 | 1 |
| 149 | 41 | M | White | Non-Hispanic | 1 | 17 | 28 | 327 | 2 |
| 157 | 50 | M | White | Non-Hispanic | 0 | 10 | 32 | 355 | 1 |
| 178 | 26 | F | White | Non-Hispanic | 1 | 6 | 24 | 346 | 1 |
| 186 | 38 | F | N/A | N/A | 0 | 15 | 33 | 356 | 1 |
| 190* | 54 | F | White | Non-Hispanic | 0 | 18 | 63 | 372 | 4 |
| 201 | 50 | M | White | Non-Hispanic | 1 | 15 | 33 | 359 | 2 |
| 222 | 28 | M | Asian | Non-Hispanic | 1 | 19 | 37 | 347 | 2 |
| 229 | 45 | M | White | Non-Hispanic | 1 | 10 | 63 | 379 | 2 |
| 230 | 50 | M | White | Non-Hispanic | 0 | 18 | 33 | 372 | 2 |
| 233 | 55 | M | White | Non-Hispanic | 0 | 20 | 41 | 377 | 2 |
| 256 | 63 | F | White | Non-Hispanic | 0 | 27 | 42 | 337 | 2 |
| 287 | 47 | M | White | Non-Hispanic | 0 | 11 | 23 | 344 | 1 |
| 310 | 34 | F | White | Non-Hispanic | 0 | 17 | 35 | 332 | 2 |
| 319 | 50 | M | White | Non-Hispanic | 1 | 5 | 38 | 334 | 2 |
| 325 | 52 | M | White | Non-Hispanic | 0 | 16 | 38 | 353 | 2 |
| 328 | 54 | F | White | Non-Hispanic | 0 | 22 | 62 | 365 | 2 |
| 353 | 60 | M | White | Non-Hispanic | 0 | 14 | 49 | 366 | 2 |
| 393* | 69 | M | White | Non-Hispanic | 0 | 23 | 54 | 362 | 5 |
| 394 | 48 | F | Multiple | Hispanic | 2 | 7 | 67 | 375 | 2 |
| 401 | 61 | M | White | Non-Hispanic | 0 | 16 | 53 | 371 | 2 |
| 403* | 52 | M | Asian | Non-Hispanic | 1 | 18 | 39 | 356 | 4 |
| 410 | 34 | M | White | Non-Hispanic | 1 | 12 | 46 | 349 | 2 |
| 437 | 43 | F | Asian | Non-Hispanic | 1 | 14 | 34 | 353 | 2 |
| 461 | 49 | M | White | Non-Hispanic | 2 | 7 | 39 | 350 | 2 |
| 500 | 46 | M | White | Non-Hispanic | 0 | 12 | 53 | 375 | 2 |
| 501* | 32 | M | Asian | Non-Hispanic | 0 | 18 | 53 | 367 | 4 |
| 507 | 39 | M | White | Non-Hispanic | 0 | 15 | 60 | 361 | 2 |
| 537 | 52 | M | White | Non-Hispanic | 2 | 15 | 45 | 357 | 2 |
| 539* | 73 | F | White | Non-Hispanic | 1 | 20 | 55 | 362 | 5 |
| 547* | 59 | M | White | Non-Hispanic | 0 | 15 | 36 | 359 | 3 |
| 632 | 38 | M | White | Non-Hispanic | 0 | 10 | 43 | 354 | 2 |
| 633 | 39 | M | White | Non-Hispanic | 0 | 8 | 57 | 358 | 1 |

| Post-acute Sx | Vaccination status | | |
|---|---|---|---|
| persistence † | Vaccine | # of doses received | Days between first dose |

| ID | | At 6.2 m | | At 1 y | | received | | prior to 1 y study visit | | | | and 1 y study visit | | | |
|---|---|---|---|---|---|---|---|---|---|---|---|---|---|---|---|
| 7 | | Y | | Y | | Pfizer-BioNTech | | 2 | | | | 65 | | | |
| 8 | | Y | | N | | N | | N/A | | | | N/A | | | |
| 9 | | Y | | N | | N | | N/A | | | | N/A | | | |
| 20 | | N | | N | | Moderna | | 2 | | | | 35 | | | |
| 21 | | Y | | N | | N | | N/A | | | | N/A | | | |
| 24 | | N | | N | | Pfizer-BioNTech | | 2 | | | | 52 | | | |
| 31 | | Y | | N | | Pfizer-BioNTech | | 2 | | | | 36 | | | |
| 38 | | N | | N | | N | | N/A | | | | N/A | | | |
| 40 | | N | | N | | N | | N/A | | | | N/A | | | |
| 46 | | Y | | N | | N | | N/A | | | | N/A | | | |
| 47 | | Y | | Y | | N | | N/A | | | | N/A | | | |
| 55 | | N | | N | | Moderna | | 2 | | | | 41 | | | |
| 57 | | N | | N | | Pfizer-BioNTech | | 2 | | | | 46 | | | |
| 71 | | Y | | N | | Pfizer-BioNTech | | 2 | | | | 62 | | | |
| 72 | | Y | | N | | N | | N/A | | | | N/A | | | |
| 75 | | N | | N | | N | | N/A | | | | N/A | | | |
| 76 | | Y | | N | | N | | N/A | | | | N/A | | | |
| 88 | | N | | Y | | N | | N/A | | | | N/A | | | |
| 96 | | N | | N | | Pfizer-BioNTech | | 2 | | | | 54 | | | |
| 98 | | N | | N | | N | | N/A | | | | N/A | | | |
| 99 | | N | | N | | N | | N/A | | | | N/A | | | |
| 107 | | Y | | N | | N | | N/A | | | | N/A | | | |
| 114 | | Y | | Y | | N | | N/A | | | | N/A | | | |
| 115 | | N | | N | | Moderna | | 1 | | | | 12 | | | |
| 119 | | N | | N | | N | | N/A | | | | N/A | | | |
| 120 | | N | | Y | | Moderna | | 2 | | | | 67 | | | |
| 125 | | N | | N | | Pfizer-BioNTech | | 2 | | | | 36 | | | |
| 131 | | N | | N | | N | | N/A | | | | N/A | | | |
| 134 | | N | | N | | Pfizer-BioNTech | | 2 | | | | 42 | | | |
| 135 | | N | | N | | Moderna | | 1 | | | | 27 | | | |
| 140 | | N | | N | | N | | N/A | | | | N/A | | | |
| 149 | | N | | N | | N | | N/A | | | | N/A | | | |
| 157 | | N | | N | | N | | N/A | | | | N/A | | | |
| 178 | | N | | N | | Pfizer-BioNTech | | 2 | | | | 29 | | | |
| 186 | | N | | N | | Pfizer-BioNTech | | 2 | | | | 73 | | | |
| 190* | | Y | | N | | N | | N/A | | | | N/A | | | |
| 201 | | N | | N | | N | | N/A | | | | N/A | | | |
| 222 | | N | | N | | Pfizer-BioNTech | | 2 | | | | 41 | | | |
| 229 | | N | | N | | N | | N/A | | | | N/A | | | |
| 230 | | Y | | N | | Pfizer-BioNTech | | 1 | | | | 3 | | | |
| 233 | | N | | N | | Moderna | | 1 | | | | 8 | | | |
| 256 | | Y | | Y | | N | | N/A | | | | N/A | | | |
| 287 | | N | | N | | N | | N/A | | | | N/A | | | |
| 310 | | Y | | N | | N | | N/A | | | | N/A | | | |
| 319 | | N | | N | | N | | N/A | | | | N/A | | | |
| 325 | | Y | | N | | Moderna | | 2 | | | | 49 | | | |
| 328 | | N | | N | | N | | N/A | | | | N/A | | | |
| 353 | | Y | | N | | N | | N/A | | | | N/A | | | |
| 393* | | N | | N | | Moderna | | 2 | | | | 57 | | | |
| 394 | | N | | N | | Moderna | | 1 | | | | 2 | | | |
| 401 | | Y | | N | | Pfizer-BioNTech | | 1 | | | | 18 | | | |
| 403* | | Y | | N | | N | | N/A | | | | N/A | | | |
| 410 | | Y | | Y | | N | | N/A | | | | N/A | | | |
| 437 | | N | | N | | N | | N/A | | | | N/A | | | |
| 461 | | Y | | N | | N | | N/A | | | | N/A | | | |
| 500 | | N | | N | | Pfizer-BioNTech | | 1 | | | | 20 | | | |
| 501* | | Y | | N | | N | | N/A | | | | N/A | | | |
| 507 | | Y | | Y | | N | | N/A | | | | N/A | | | |
| 537 | | Y | | Y | | Pfizer-BioNTech | | 1 | | | | 14 | | | |
| 539* | | Y | | N | | Pfizer-BioNTech | | 2 | | | | 50 | | | |
| 547* | | N | | N | | N | | N/A | | | | N/A | | | |
| 632 | | Y | | N | | Moderna | | 2 | | | | 82 | | | |
| 633 | | N | | N | | N | | N/A | | | | N/A | | | |
| | ELISA binding | | | | | | | | | | | | | | |
| | RBD (AUC) | | | | | | | | | N (AUC) | | | Neutralization | | |
| | IgG | IgG | IgG | IgM | IgM | IgM | IgA | IgA | IgA | IgG | IgG | IgG | (NT50) | | |
| ID | (1.3 m) | (6.2 m) | (1 y) | (1.3 m) | (6.2 m) | (1 y) | (1.3 m) | (6.2 m) | (1 y) | (1.3 m) | (6.2 m) | (1 y) | (1.3 m) | (6.2 m) | (1 y) |
| 7 | 11981 | 9545 | 36479 | 6524 | 1516 | 3827 | 1479 | 1344 | 1559 | 17932 | 11365 | 4897 | 2730 | 192 | 2674 |
| 8 | 9010 | 7653 | 5987 | 1998 | 1153 | 1800 | 1342 | 1380 | 747 | 15310 | 15258 | 3024 | 151 | 39 | 89 |
| 9 | 18953 | 12848 | 12830 | 2963 | 1753 | 3264 | 989 | 1227 | 1162 | 26025 | 18165 | 11053 | 306 | 295 | 259 |
| 20 | 4134 | 8690 | 35874 | 1976 | 1228 | 2715 | 1018 | 1314 | 4702 | 6915 | 11222 | 3964 | 50 | 172 | 3186 |
| 21 | 36389 | 20744 | 16209 | 14506 | 1242 | 1214 | 2855 | 1914 | 2183 | 26627 | 19372 | 7314 | 5053 | 561 | 219 |
| 24 | 9283 | 5312 | 34837 | 2182 | 1943 | 2080 | 2182 | 1943 | 5406 | 22188 | 12571 | 6510 | 739 | 86 | 3186 |
| 31 | 3212 | 3705 | 33801 | 1272 | 903 | 2211 | 906 | 913 | 2902 | 14630 | 15201 | 5974 | 192 | 18 | 2165 |
| 38 | 13718 | 14760 | 15525 | 2009 | 1249 | 1197 | 2902 | 3198 | 1439 | 24240 | 19370 | 4338 | 519 | 832 | 1077 |
| 40 | 5291 | 6467 | 2479 | 1792 | 1161 | 1107 | 1481 | 1501 | 769 | 16051 | 12466 | 2792 | 64 | 10 | 10 |
| 46 | 4799 | 4416 | 4291 | 2247 | 1315 | 1010 | 1055 | 1153 | 818 | 16237 | 17809 | 4863 | 59 | 21 | 13 |
| 47 | 17581 | 9284 | 7547 | 9749 | 1914 | 1247 | 1586 | 851 | 686 | 28076 | 11166 | 4741 | 10433 | 349 | 406 |
| 55 | 12982 | 6419 | 34378 | 2515 | 1487 | 7354 | 2213 | 1466 | 3484 | 35140 | 14693 | 8033 | 186 | 10 | 2377 |
| 57 | 9108 | 4987 | 36911 | 9199 | 2622 | 2829 | 954 | 884 | 4906 | 33007 | 19246 | 10804 | 2049 | 45 | 4556 |
| 71 | 5207 | 4559 | 40076 | 1606 | 998 | 4730 | 723 | 860 | 2116 | 11566 | 13880 | 6844 | 112 | 65 | 3874 |
| 72 | 24822 | 10485 | 8652 | 24034 | 2095 | 1467 | 4887 | 2407 | 1340 | 42572 | 19886 | 6620 | 3138 | 81 | 59 |
| 75 | 5083 | 3811 | 3317 | 1386 | 1459 | 1434 | 1386 | 1459 | 796 | 18130 | 12218 | 4133 | 271 | 36 | 16 |
| 76 | 8354 | 5632 | 4449 | 1697 | 1299 | 1641 | 1320 | 886 | 756 | 15458 | 13915 | 5271 | 220 | 10 | 22 |
| 88 | 8263 | 6730 | 5537 | 1789 | 2276 | 1595 | 1546 | 903 | 824 | 18158 | 14774 | 5355 | 425 | 56 | 28 |
| 96 | 24147 | 15675 | 35965 | 3959 | 1498 | 3283 | 1099 | 965 | 2167 | 26319 | 14132 | 8836 | 928 | 206 | 7047 |
| 98 | 8275 | 7190 | 7580 | 2495 | 2417 | 1819 | 2495 | 2417 | 1244 | 17424 | 16735 | 4870 | 249 | 53 | 48 |
| 99 | 12764 | 6017 | 4854 | 2693 | 2390 | 2927 | 2693 | 2390 | 971 | 25721 | 15214 | 3813 | 1128 | 163 | 91 |
| 107 | 7967 | 6298 | 5073 | 1560 | 1025 | 698 | 915 | 850 | 746 | 17859 | 16751 | 6605 | 297 | 87 | 50 |
| 114 | 5979 | 5654 | 5551 | 1163 | 912 | 1208 | 898 | 940 | 1020 | 13601 | 16423 | 2901 | 114 | 32 | 36 |
| 115 | 26997 | 11600 | 39265 | 19944 | 2081 | 16833 | 991 | 890 | 4366 | 18149 | 16624 | 5451 | 1128 | 432 | 6100 |
| 119 | 12155 | 6663 | 4561 | 7000 | 1533 | 1657 | 2152 | 1822 | 857 | 18651 | 11927 | 6673 | 650 | 35 | 67 |
| 120 | 6096 | 6292 | 37822 | 2310 | 1091 | 17357 | 856 | 1045 | 3589 | 17676 | 19803 | 4848 | 101 | 10 | 3806 |
| 125 | 4498 | 4271 | 36154 | 2234 | 1361 | 2125 | 684 | 807 | 4001 | 8313 | 12896 | 2466 | 127 | 10 | 4727 |
| 131 | 4285 | 3911 | 3351 | 1318 | 943 | 838 | 1201 | 1166 | 1473 | 11538 | 15502 | 4545 | 50 | 14 | 14 |
| 134 | 8884 | 6818 | 34219 | 7472 | 2068 | 3920 | 1057 | 982 | 2299 | 13244 | 19125 | 3305 | 2701 | 263 | 3639 |
| 135 | 9301 | 8386 | 37273 | 3157 | 888 | 1953 | 1256 | 952 | 4633 | 15168 | 14678 | 4002 | 350 | 441 | 5622 |
| 140 | 6181 | 4957 | 3889 | 1235 | 1061 | 870 | 1235 | 1061 | 675 | 9899 | 9303 | 2909 | 52 | 13 | 33 |
| 149 | 6275 | 3875 | 3349 | 1422 | 1073 | 1123 | 1058 | 842 | 893 | 10338 | 11258 | 6434 | 495 | 28 | 28 |
| 157 | 11979 | 8751 | 8099 | 11125 | 2370 | 1969 | 1969 | 1374 | 1305 | 14660 | 17104 | 5194 | 742 | 190 | 193 |
| 178 | 4316 | 3757 | 29379 | 1394 | 1373 | 1689 | 1351 | 1222 | 1553 | 8656 | 10063 | 3371 | 10 | 10 | 3358 |
| 186 | 7427 | 4850 | 29426 | 1687 | 960 | 1748 | 1085 | 815 | 2869 | 30056 | 17963 | 14723 | 297 | 73 | 2686 |
| 190* | 16156 | 10408 | 8639 | 4567 | 1664 | 1584 | 1207 | 1107 | 932 | 20932 | 20659 | 5175 | 598 | 165 | 196 |
| 201 | 26093 | 11284 | 10629 | 6230 | 1635 | 1228 | 3374 | 1477 | 1158 | 22809 | 12528 | 3856 | 3897 | 741 | 683 |
| 222 | 14063 | 6930 | 29901 | 1132 | 723 | 2554 | 2841 | 1612 | 2628 | 26050 | 12222 | 3402 | 865 | 50 | 1585 |
| 229 | 14677 | 8054 | 7342 | 5507 | 1606 | 3210 | 1066 | 1141 | 759 | 28402 | 17362 | 9449 | 1273 | 135 | 42 |
| 230 | 5605 | 5015 | 3579 | 1300 | 1868 | 2600 | 1059 | 1130 | 725 | 13086 | 16511 | 3108 | 382 | 375 | 721 |
| 233 | 6897 | 6940 | 39852 | 1917 | 1211 | 4223 | 1066 | 1065 | 8901 | 15731 | 14059 | 4278 | 173 | 11 | 7490 |
| 256 | 10574 | 6500 | 5039 | 1886 | 1533 | 1265 | 1886 | 1533 | 1137 | 13705 | 10463 | 3154 | 142 | 31 | 35 |
| 287 | 7442 | 4357 | 3719 | 2873 | 1211 | 1540 | 910 | 928 | 875 | 7904 | 9331 | 3293 | 240 | 38 | 54 |
| 310 | 26782 | 15634 | 12053 | 1554 | 1023 | 1165 | 1435 | 1083 | 781 | 16309 | 14773 | 4305 | 485 | 153 | 128 |
| 319 | 7614 | 5115 | 6751 | 2215 | 762 | 802 | 1575 | 1174 | 1015 | 20884 | 14597 | 8197 | 241 | 74 | 65 |
| 325 | 26673 | 12400 | 36423 | 16598 | 4879 | 8267 | 2703 | 1464 | 3243 | 24706 | 14249 | 7900 | 1603 | 229 | 8844 |
| 328 | 8118 | 7073 | 4172 | 1216 | 1268 | 1629 | 1216 | 1268 | 1289 | 13119 | 11306 | 2898 | 94 | 66 | 132 |
| 353 | 23981 | 13736 | 13686 | 6807 | 2062 | 2857 | 9230 | 3637 | 3702 | 18030 | 15286 | 5747 | 855 | 222 | 168 |
| 393* | 8729 | 5150 | 36605 | 13320 | 1974 | 3013 | 1075 | 892 | 3388 | 17562 | 14677 | 7767 | 715 | 144 | 7448 |
| 394 | 22856 | 12823 | 8710 | 6178 | 1909 | 1680 | 1009 | 1131 | 800 | 51906 | 21771 | 13174 | 1281 | 282 | 157 |
| 401 | 31108 | 19746 | 39646 | 1677 | 1336 | 4192 | 1677 | 1336 | 2943 | 60223 | 20789 | 10682 | 1098 | 134 | 2607 |
| 403* | 24462 | 13614 | 9726 | 4060 | 3187 | 2741 | 2107 | 1164 | 745 | 65874 | 31566 | 19884 | 3888 | 179 | 97 |
| 410 | 6355 | 4353 | 2915 | 2465 | 1730 | 1036 | 1249 | 1112 | 881 | 11819 | 13521 | 2788 | 222 | 65 | 11 |
| 437 | 15987 | 6834 | 5947 | 3051 | 1940 | 2383 | 3051 | 1940 | 846 | 29562 | 19672 | 20813 | 699 | 146 | 166 |
| 461 | 17491 | 13418 | 15051 | 6867 | 1946 | 1784 | 1827 | 1454 | 960 | 15520 | 17774 | 3995 | 1077 | 361 | 310 |
| 500 | 6039 | 5366 | 38262 | 2254 | 2305 | 2599 | 2356 | 2412 | 3332 | 13529 | 10163 | 2411 | 194 | 36 | 3485 |
| 501* | 22775 | 8667 | 6865 | 5272 | 1242 | 2753 | 1557 | 1098 | 1057 | 19988 | 17865 | 8487 | 719 | 125 | 121 |
| 507 | 15458 | 7586 | 7509 | 4505 | 989 | 1202 | 1208 | 1218 | 822 | 17577 | 14739 | 6043 | 400 | 49 | 59 |
| 537 | 11285 | 6443 | 41958 | 2448 | 1083 | 3094 | 1245 | 1192 | 11894 | 14738 | 13093 | 5813 | 923 | 986 | 22487 |
| 539* | 20337 | 9568 | 36182 | 7505 | 1386 | 3939 | 1714 | 2124 | 1903 | 25274 | 16871 | 6207 | 488 | 50 | 9970 |
| 547* | 28228 | 19742 | 19003 | 3863 | 2048 | 2358 | 3863 | 2048 | 797 | 81694 | 25983 | 17121 | 2901 | 211 | 358 |
| 632 | 16796 | 9152 | 42260 | 1766 | 1548 | 20485 | 2415 | 1833 | 16858 | 13282 | 13881 | 7279 | 572 | 161 | 8383 |
| 633 | 8759 | 5108 | 3745 | 1436 | 1224 | 1313 | 2019 | 1404 | 774 | 25328 | 12124 | 3136 | 135 | 32 | 51 |

Sx = symptoms
*= hospitalized
¶ = WHO Ordinal Scale for Clinical Improvement, COVID-19 Trial Design Synopsis
† = Persistent fatigue, dyspnea, athletic deficit, or ≥3 other solicited symptoms beyond 6 weeks from Sx onset
Reported data are median (range) unless stated otherwise

TABLE 3
Representative amino acid sequences of the disclosed antibodies

| | Anti- | SEQ | | SEQ | |
|---|---|---|---|---|---|
| Participant | body | ID | | ID | |
| ID | ID | NO | IGH VDJ (aa) | NO | IGL VJ (aa) |
| COV21 | C837 | 1 | QVQLVESGGGVVQPGRSLRLSCEAS | 2 | QSVLTQPPSASGTPGQRVTIPCSGG |
| | | | RFTFRSHAMHWVRQAPGKGLEWVAV | | SSNIGSNTVHWYQQVPGTAPKLLVY |
| | | | IWYDGKNEYYADSVKGRFTISRDNS | | GNNRRPAGVPDRFSGSRSGASASLA |
| | | | KKMVYLQMNNLRAEDTAVYYCAREG | | ITGLQSEDEAVYYCATWDDSPNGPV |
| | | | IAAPDSKADAFDIWGQGTMVTVSS | | FGGGTKLTVL |
| | C838 | 3 | EVQLVESGGGLVQPGKSLRLSCTAS | 4 | EIVLTQSPATLSLSPGERATLSCRA |
| | | | GFTFEDYAMHWVRQAPGKGLEWVSG | | SQSVGTYLAWYQHKLGQAPRLLIYD |
| | | | INWKSGSRGYADSAKGRFTISGNTA | | ATKRATGIPARFSGSGSGTDFTLTI |
| | | | KNTLHLQMNSLRAEDTAFYYCAKAG | | SSLEPEDFAIYYCQQRITFGQGTRL |
| | | | VRNIAAAGPDLNFDFWGQGTLVTVS | | EIK |
| | | | S | | |
| | C839 | 5 | QVQLQESGPGLVKPLDTLSLTCTVS | 6 | DIQMTQSPSSLSASIRDRVTITCQA |
| | | | GASISSYYWSWIRQPAGKGLEWIGL | | SQDISNYLNWYQQKAGEAPKLLIYD |
| | | | IYSSGSTTYNPSLKSRVTMSVDTSK | | ASSLETGVPSRFSGSGSGTEFTLTI |
| | | | KQFSLNLSSMTAADTAVYYCARGSA | | SSLQPEDIATYYCQQYDHVPLTFGG |
| | | | LNWKSIGYFDSWGQGTLVTV | | GTKVEIK |
| | C840 | 7 | QVQLVESGGGVVQPGRSLRLSCEAS | 8 | DIQMTQSPSSLSASVGDRVTITCRA |
| | | | GFTFTAYAMHWLRQAPGKGLEWVAV | | SQSVNNYLNWYQQKPGQAPKLLIYA |
| | | | ILNDGSNKLYADSVKGRFTVSRDNS | | ASSLQSGVPLRFSGSGSGTDFALTI |
| | | | KNMLYLQVNSLRVDDTAVYYCARDG | | TSLHTEDFATYYCQQSYNTPPWTFG |
| | | | SVDTLMVTWFDYWGQGTLVTVSS | | PGTKVEIK |
| | C841 | 9 | [sequence omitted] | 10 | SYELTQPPSVSVAPGKTARIPCGGD |
| | | | GFTFSIFSMNWVRQAPGKGLEWISY | | SVGSKSVHWYQQKSGQAPVLVIHSD |
| | | | ISSSSGSRHYADSVKGRFTISRDNA | | SDRPSGIPERFSGSNSGNTATLTIT |
| | | | KNSLYLQMNNLRDEDTAMYYCAREA | | GVAAGDEADYYCHVWDTIGDRFYWV |
| | | | HDGALTGYGDYLNWFDPWGQGVLVT | | FGGGTKLTVL |
| | | | VSS | | |
| | C842 | 11 | QVQLVESGGGVVQPGRSLRLSCAAS | 12 | DIQMTQSPSSLSASVGDRVTITCQA |
| | | | GFTFSTYAIHWVRQAPGKGLEWVAA | | SQHISNYLNWYQQKPGKAPKLLIYD |
| | | | ISYDGSNKYYSDSVKGRLFISRDNS | | ASNLETGVPSRFSGTGSGTDFAFTI |
| | | | NNTVYLQMNNLRAEDTAIYYCARDG | | SSLQPEDIATYYCQQYDNLPPVFGP |
| | | | TIVTLVRGVMGPPFDYWGQGTLVTV | | GTKVDIK |
| | | | SS | | |
| | C843 | 13 | QVQLVESGGGVVQPGRSLRLSCAAS | 14 | DIQMTQSPSSLSASVGDRVTITCQA |
| | | | GFTFSRYAMHWVRQAPGKGLEWVAV | | SQDISNYLNWYQQKPGKAPKLLIYD |
| | | | ISYDGSNKYYATSLKGRCTISRDNS | | ASDLETGVPSTFSGSGSGTDFTLTI |
| | | | KNTLYLQMNSLRAEDTAVYFCAKQI | | SSLQPEDFATYYCQQYDIVPFTFGP |
| | | | GEYCSGGNCYQGSLDYWGQGTLVTV | | GTKVDIK |
| | | | SS | | |
| | C844 | 15 | EVQLVESGGGLVKPGGSLRLSCVAT | 16 | DIQMTQSPSSLSASVGDRVTITCRA |
| | | | GFSFSDAWMNWVRQAPGKGLEWVGR | | SQSIGHYLNWYQQKPGKAPKLLIYA |
| | | | IRSEIADGTTDYAAPVKGRFTISRD | | ASSLQSGVPSRFSGSGSGAGFTLTV |
| | | | DARNTLYLQMNSLEIEDTAVYYCTT | | NGLQPEDLATYYCQQYYTTPPTFGQ |
| | | | GVVVVVSSSPDDAFDVWGQGTMVTV | | GTKVEIK |
| | | | SS | | |
| | C845 | 17 | QVQLQESGPGLVKPSQTLSLTCTVS | 18 | EIVLTQSPATLSLSPGERATLSCRA |
| | | | GASISSGEYYWSWVRQPPGKGLEWV | | SQSVGSDLAWYQQKPGQAPRLLIYD |
| | | | GYIYYSGSTYYNPSLKSRVTISVDT | | TSNRATGIPARFSGSGSGTDFTLTI |
| | | | SKNHFSLKLKSLTAADTAVYFCATG | | SSLDPADFAVYYCQQRTNWLFSFGP |
| | | | GLSAFGELFPHDKWGQGTLVTVSS | | GTKVDIK |
| | C846 | 19 | QVQLVESGGGVFQPGRSLRLSCAAS | 20 | DIQMTQSPSSLSASVGDRVTITCRA |
| | | | GFNFRTYAMHWVRQAPGKGLEWVAV | | SQSIRTFLSWYQQKAGKAPKLLIYT |
| | | | ILDDGSGKFYADSVKGRFTVSRDNS | | ASSLQNGVPSRFSGSGSGTDFTLTI |
| | | | KHTLYLQMTSLSAEDTAIYFCARDQ | | SSLQPEDFATYYCQQSYETPPWTFG |
| | | | GTATTYFDHWGQGTLVTVSS | | QGTKVEIK |
| | C847 | 21 | QVQLVESGGGVVQPGGSLRLSCGAS | 22 | DIQMTQSPSSLSASVGDRVTITCRA |
| | | | GFTFSSYAMHWVRQAPGEGLEWVAV | | SQSISSYLNWYQQKPGKAPKLLIYT |
| | | | ILYDGAGKFYADSVKGRFTISRDNS | | ASSLQSGVPSRFSGSGSGTDFTLTI |
| | | | KNTLYLQMNSLRAEDTAVYYCARDY | | TSLQPEDFATYYCQQSYNTPPWTFG |
| | | | GDYVTHFDYWGQGALVTVSS | | QGTKVEIK |
| | C848 | 23 | QVQLQESGPGLVKPSQTLSLTCTVS | 24 | QSALTQPPSASGSPGQSVTISCTGT |
| | | | GGSISSGDYYWSWIRQPPGKGLEWI | | SSDVGTYDYVSWYQQHPGKAPKVII |
| | | | GYIYYTGITYYRPSLKSRVTISVDT | | YEVTKRPSGVPDRFSGSKSGNTASL |
| | | | SKNQFSLKLSSVTAADTAVFYCARV | | TVSGLQAEDEAHYYCSTYAGSDNLE |
| | | | VRLWPRYFDSWGQGTLVTVSS | | FGGGTKLTVL |
| | C849 | 25 | QVQLVQSGAEVKKPGASVKVSCRAS | 26 | SYELTQPPSVSVAPGKTARITCGGD |
| | | | GYTFTDHYIHWVRQAPGQGLEWMGW | | DIGSKSVHWYQQKSGQAPVLVIHDD |
| | | | INPNSGDTNYPQKFQGRVTMARDTS | | SDRPSGIPERFSGSNSGNTATLTIS |
| | | | ISTAHMELRRLKSDDTAVYYCARTS | | RVEAGDEADYYCQVWDFTGDHPGWV |
| | | | SPHSSSTGDFDSWGQGTLVTVSS | | FGGGTKLTVL |
| | C850 | 27 | QVQLQESGPGLVKPSETLSLICSVS | 28 | EIVLTQSPGTLSLSPGERATLSCRA |
| | | | GVSVSSRNFFWSWIRQPPGKGLEWI | | SQSITSSSLAWYQQKRGQPPRLLIY |
| | | | GYMSYGGNTNYNPSLKSRVTISIDT | | GASSRATGIPDRFSGSGSGTDLTLT |
| | | | SKNQFSLKLSSVTAADTAVYYCARE | | ISRLEPEDFAVYYCQQYGNSPYTFG |
| | | | TYYYDRSGYYSSDGFDYWGQGILVT | | QGTKLEIK |
| | | | VSS | | |
| | C851 | 29 | QLQLQESGPGLVKTSETLSLTCTVS | 30 | DIQMTQSPSSLSASVGDRVTITCQA |
| | | | GGSISSGNSYWGWIRQPPGKGLEWI | | SQDISRYLNWFQHKPGKAPKLLIYD |
| | | | GDIYYSGSTFYNPSLKSRLTISVDT | | ASNLEAGVPSRFTGSGSGTEFTFTI |
| | | | SKNQFSLKLTSVTAADTAVYYCARR | | SSLQPEDFAIYFCQQYDSLPLTFGG |
| | | | GGRTPVRFNYGGDVWGQGTTVTVSS | | GTKVEI |
| | C852 | 31 | [sequence omitted] | 32 | SYELTQPPSVSLAPGKTASITCGGD |
| | | | GYIFTGFYMHWVRQAPGQGPEWMGW | | SIGSKSVHWYQQRPGQAPILVIYYD |
| | | | INPNSGGTNYAQKFQGRVTMTRDTS | | GDRPSGIPERFSGSNSGNTATLTIS |
| | | | ISTAYMELSRLRSDDTALYYCARGG | | RVEAGDEADYYCQVWDGGWVFGGGT |
| | | | QDELTGTFDVWGQGTMVTVSS | | KLTVL |
| | C853 | 33 | QVQLQESGPGLVKASQTLSLTCTVS | 34 | QSALTQPPSASGSPGQSVTISCIGT |
| | | | GGSFRSGGYYYNWIRQHPGKGLEWI | | SSDVGGYNYVSWYQHHPGKAPKLII |
| | | | GYIFYTGVTYYNPSLKSRVSISVDT | | YEVSKRPSGVPDRFSGSKSGNTASL |
| | | | SKNQLSLNLTSVTAADTAVYYCARG | | TVSGLQADDEADYYCSSYAGSNNWV |
| | | | SYSDYNGGWDYWGRGTLVTVS | | FGGGTKLTV |
| | C854 | 35 | EVQLVESGGGLIQPGGSLRLSCAAS | 36 | EIVLTQSPGTLSLSPGERATLSCRA |
| | | | GITVSSNYMNWVRQAPGKGLEWVSV | | SQSVSSSYLAWYQQKPGQAPRLLIY |
| | | | LYAGGSTFYADSVKGRFTISRDDSK | | GASSRATGIPDRFSGRGSGTDFTLT |
| | | | NTLYLQMDSLRAEDTAVYYCARDLS | | ISRLEPEDFAVYYCQQYGSLYTFGQ |
| | | | SSGGFDYWGQGTLVTVSS | | GTKLEIK |
| | C855 | 37 | QVQLVESGGGVVQPGRSLRLSCAAS | 38 | DIQMTQSPSSLSASVGDRVTISCQA |
| | | | GFAFSTYGMHWVRQTPGKGLAWVAA | | SQGISNYLNWYQQKPGKAPKLLIHD |
| | | | ISYDGRNTYYGDSVKGRFTITRDNS | | ASILETGVPSRFSGSGSGTDFTFTI |
| | | | KNTLYLQLNSLRDEDTALYYCARDA | | SSLQPEDIATYYCQQYDNFPPDFGP |
| | | | TMITLVRGIMGPPFDHWGQGSLVTV | | GTKVDI |
| | | | SS | | |
| | C856 | 39 | QVQLVESGGGVVQPGRSLRLSCAAS | 40 | DIQMTQSPSSLSASVGDRVTITCQA |
| | | | GFTFSSYGMHWVRQAPGKGLEWVAV | | SQDISNYLHWYQQKPGKAPKLLIYD |
| | | | ISYDGSNKYYADSVKGRFTISRDNS | | ASNLETGVPSRFSGSGSGTDFTFTI |
| | | | KNTLYLQMSSLRAEDTAVYYCAKQI | | SSLQPEDIATYYCQQYDNLPFTFGP |
| | | | GEYCSGGSCYQGSLDYWGQGTLVTV | | GTKVDIK |
| | | | SS | | |
| | C857 | 41 | QVQLQESGPGLVKPSQTLSLTCTVS | 42 | EIVLTQSPATLSLSPGERATLSCRA |
| | | | GGSISSGGYYWSWIRQHPGKGLEWI | | SQSVSTYLAWYQQKPGQAPRLLIYD |
| | | | GYIYYSGSTYYNPSLESRVTISVDT | | ASNRATGIPARFSGSGSGTDFTLTI |
| | | | SKNQFSLKLSSVTAADTAVYYCASG | | SSLEPEDFAVYYCQQRSNWLFTFGP |
| | | | ELSAFGELFPHDYWGQGTLVTVSS | | GTKVDIK |
| | C858 | 43 | QVQLVESGGGVVQPGRSLRLSCAAS | 44 | DIQMTQSPSSLSASVGDRVTITCRA |
| | | | GFTFSSYAMHWVRQAPGKGLEWVAV | | SQSISSYLNWYQQKPGKAPKLLIYA |
| | | | ILYDGSNKYYADSVKGRFTISRDNS | | ASSLQSGVPSRFSGSGSGTDFTLTI |
| | | | KNTLYLQMNSLRAEDTAVYYCARDQ | | SSLQPEDFATYFCQQSYNTPPWTFG |
| | | | GMATTYFDYWGQGTLVTVSS | | QGTKVEIK |
| | C859 | 45 | QVQLVQSGAELKKPGASVRVSCKAS | 46 | SYELTQSPSVSVAPGKTARITCGGR |
| | | | GYTFTDYYIHWVRQAPGQGFEWMGW | | DIGSKSVHWYQQRPGQAPVLVISYD |
| | | | INPDSGGTNYPQNFQGRVTMTRGTS | | NDRPSGIPERFSGSNSGNTATLTIS |
| | | | ISTAYVELTRLRFDDTAVYYCARTS | | RVEAGDEADYYCQVWDGTGDHPGWV |
| | | | SPHSSSTGDLDYWGQGTLVTVS | | FGGGTRLTVL |
| | C860 | 47 | [sequence omitted] | 48 | SYELTQPPSVSVAPGKTARITCGGN |
| | | | GYTFTGYYMHWVRQAPGQGLEWMGW | | SIGSKSVHWYQQKPGQAPVLVIYYD |
| | | | INPNSGGTNYAQKFQGRVTMTRDTS | | SDRPSGIPERFSGSNSGNTATLTIS |
| | | | ISTAYMELSRLTSDDTAVYYCARGG | | RVEAGDEADFHCQVWDSGWVFGGGT |
| | | | QDELTGAFDIWGQGTMVTVSS | | KLTVL |
| | C861 | 49 | QVQLQESGPGLVKPSQTLSLTCTVS | 50 | QSALTQPPSASGSPGQSVTISCTGT |
| | | | GGSISSGGYYWGWIRQHPGKGLEWI | | SSDVGGYNYVSWYQQHPGKAPKLMI |
| | | | GYIYYSGSTYYNPSLKSRVTISVDT | | YEVSKRPSGVPDRFSGSKSGNTASL |
| | | | SKNQFSLKLSSVTAADTAVYYCARG | | TVSGLQAEDEADYYCSSYAGSNNWV |
| | | | SYSNYNGGLDYWGQGTLVTVSS | | FGGGTKLTVL |
| | C862 | 51 | QVQLQESGPGLVKPSQTLSLTCTVS | 52 | DIQMTQSPSSLSAFVGDRVTITCQA |
| | | | GASISSSEHYWSWIRQPPGKGLEWI | | SQDINKYVNWYQQKPGKAPKLLIYD |
| | | | GYISYSGGTYQNPSLQSRMTLSMDA | | ASNLQTGVPSRFSGSGSGTHFTFTI |
| | | | SKNQFSLKLSSVTAADTAVYFCARL | | SSLQPEDFATYYCQEYDNLFSISFG |
| | | | NTMIVMINGVFDVWGQGTMVTVSS | | QGTRLEIK |
| | C863 | 53 | EVQLLESGGGLVRPGGSLRLSCAAS | 54 | EIVLTQSPGTLSLSPGERATLSCRA |
| | | | GFIFGSYAMTWVRQAPGKGLEWVST | | RQGVSSTYLAWYQQKPGQAPRLLIY |
| | | | ISGGGTSTDYADSVKGHFTISRDNG | | GASSRATGIPDRFSGSGSGADFTLT |
| | | | KNTLYLQMNSLRAEDTAVYYCVKES | | ISRLEPEDFAVYYCQQYGTSPYTFG |
| | | | DYYMASVNGMDVWGHGTTVTVSS | | QGTKLEIK |
| | C864 | 55 | QVQLVQSGPEVKKPGTSVKVSCKAF | 56 | EIVLTQSPGTLSLSPGERATLSCRA |
| | | | QLSFSVSAVQWVRQARGQRLEWIGW | | SQSVNSNYLAWYQQKPGQAPRLLIF |
| | | | IVVGSGNTNYAQKFQERVTITRDMS | | GPSNRATGIPDRFSGSGSGTDFTLT |
| | | | TSTVYMEVRSLRSEDTAVYYCAAPQ | | ISRLESEDFAVYYCQQYGSSPWTFG |
| | | | CNRTTCYDAFDMWGQGTMVTVSS | | QGTKVEIK |
| | C865 | 57 | EVQLLESGGGLVQPGGSLRLSCVAS | 58 | DIQLTQSPSSLSASVGDRVTITCRA |
| | | | RFIFSRYALSWVRQAPGKGLEWVSG | | SQGISSALAWYQQRPGKAPRLLIYD |
| | | | ISGSGHSTHYADSVTGRFTISRDNS | | ASSLDSGVPSRFSGSGSGTDFTLTI |
| | | | KNTVYLQMSSLRAEDTAVYYCAKGP | | SSLQSEDFATYYCQQFINNPLTFGG |
| | | | RSNYDYFESWGQGTLVTVSS | | GTKVEIK |
| | C866 | 59 | EVQLVESGGGLVQPGRSLRLSCVAS | 60 | DIQLTQSPSSVSASVGDRVTITCRA |
| | | | GFEFEDYGMHWVRQVPGKGLEWVSG | | SQGISNWLAWYQKKPGKAPKLLIYA |
| | | | ISWNSASVGYADSVRGRFTISRDNA | | TSSLQSGVPSRFSGSGSETDFTLTI |
| | | | KNSLYLQMNSLRAEDTALYYCGKQI | | RSLQPEDFATYYCQQANSYPLTFGQ |
| | | | NEWSHFLDYWGQGTLVTVSS | | GTKLEIK |
| | C867 | 61 | QVQLQESGPGLVKSSETLSLTCTVS | 62 | QSALTQPPSASGSPGQSVTISCTGT |
| | | | SGSVRSGGYYWSWIRHHPGKGLEWI | | SSDVGGHNYVSWYQQFPGKAPKLII |
| | | | GYIFYTGITYYNPSLKSRVIVSVDP | | YDVNKRPSGVPDRFSGSKSANTASL |
| | | | SKNQFSLNLTSVTAADTAVYYCAST | | TVSGLQAEDEADYHCSSYAGSNNWV |
| | | | PYTNGGAFHIWGQGTMVTVSS | | FGGGTKLTVL |
| | C868 | 63 | QVQLQESGPRLVKPSETLSLTCIVS | 64 | DIQMTQSPSTLSASVGDRVTISCRA |
| | | | GGSVSSNNFYWSWIRQPPGKRLEWI | | SQNISSWLAWYQQEAGKAPKLLIYK |
| | | | GYFYNSGSSKYNPSLKSRVTISGDT | | ASSLESGVPSRFSGSGSGTEFTLTI |
| | | | SKNQFSLKLSSVTAADTAVYYCARE | | SSLQPGDFATYYCQQYNIYSYTFGQ |
| | | | TFFYDRTGHYKSDGFDVWGQGTMVT | | GTKLEIK |
| | | | VSS | | |
| | C869 | 65 | QVQLVESGGGVVQPGTSLRLSCAAS | 66 | DIQMTQSPSSLSASVGDRVTITCRA |
| | | | GFTFSSFGMNWVRQAPGKGLEWVAV | | SQDIRDDLNWYQHKPGKAPKLLIYT |
| | | | IFFDGSKTYYADSVKGRFTISRDNS | | ASSLQSGVPSRFSGSGSGTDFTLTI |
| | | | KNTLYLQMNSLRTEDTAVYYCAKGQ | | SRLQPEDFASYYCLQDHNYPLTFGQ |
| | | | LRLGEFDDYWGQGTLVTVSS | | GTKLEIK |
| | C870 | 67 | EVQLVESGGGLVQPGKSLRLSCAGS | 68 | QSALTQPASVSGSPGQSVTISCTGT |
| | | | GFAFSSYHMNWVRQAPGKGLEWVAY | | RSDVGSYDLVSWYQLHADKAPKLII |
| | | | ISSGSSTIHYADSVKGRFTISRDNA | | YEVTSRPSGISTRFSGSKSGNTASL |
| | | | KNSFYLQMNSLRAEDTALYYCARAI | | TISGLQAEDEADYYCCSYAGTTWLF |
| | | | VGTKGYMDVWGKGTTVTVSS | | GGGTRLTVL |
| | C950 | 69 | QVQLVESGGGLVKPGGSLRLSCAAS | 70 | QSVLTQPPSASGTAGQRVTISCSGG |
| | | | GFTFSDYCVTWIRQAPGKGLEWLSY | | SSNIGSNTVHWYQQLPGTAPKLLIY |
| | | | SNTNDSSRSYADSVKGRFTISRDNA | | SNYKRPSGVPDRFSGSKSGASASLA |
| | | | KNSLYLQMDSLRAEDTAVYYCARRG | | ISGLQSEDEAEYYCAAWDDSANGPI |
| | | | DGNVPLFHYYYMDVWGKGTTVTVSS | | FGGGTKLTVL |
| COV47 | C871 | 71 | EVQLVESGGGLIQTGGSLKLSCAAS | 72 | QSALTQPASVSGSPGQSITISCTGT |
| | | | GFIVTNNYMSWVRQAPGKGLEWVSV | | SSDVGGYNYVSWYQQHPGKAPKLMI |
| | | | IYSGGTTYYADSVKGRFTISRDISK | | YDVSNRPPTISNRFSGSKSGNTASL |
| | | | NTLYLQMNSLKAEDTAVYYCAREGD | | IISGLQPEDEADYYCSSFTSNNTRV |
| | | | VEGISDSWSGYSRDRYYFDHWGQGT | | FGTGTKVTVL |
| | | | LVTVSS | | |
| | C872 | 73 | EVQLVESGGGLIQPGGSLRLSCAAS | 74 | QSALTQPASVSGSPGQSITISCTGT |
| | | | GFIVSNNYISWVRQAPGKGLEWVSV | | SSDVGAYNYVAWYQQHPGKAPKLMV |
| | | | IYSGGTTYYADSVKGRFSISRDTSK | | YDVSKRPSGVSNRFSGSKSGNTASL |
| | | | NTVYLQINNLRAEDTAVYYCAREGD | | TISGLQTEDEGDYYCCSYTTNTTRV |
| | | | VDGNYGFWSGYSRDRYYFDYWGQGT | | FGTGTMLTVL |
| | | | LVTVSS | | |
| | C873 | 75 | QVQLVQSGPEVKKPGASVKVSCKAS | 76 | QSALTQPASVSGSPGQSVTISCTGT |
| | | | GYIFTDYSIHWVRQAPGQGLEWMGW | | SSDVGGYNFLSWYQQHPGKAPKLLL |
| | | | INPNSGGGNSAQIFKGRATMARDTS | | YEVINRPSGVSDRFSGSKSGNTASL |
| | | | ITTVYMDLSGLRSDDTAVYYCARGP | | TISGLQAEDEADYYCNSYTSNFTWV |
| | | | LFHKVVYESSSGFHDGLDFWGQGTM | | FGGGTHLTV |
| | | | VTVSS | | |
| | C874 | 77 | QVQLVQSGPEVKKPGASVKVSCKAS | 78 | NFMLTQPHSVSESPGKTVTISCTGS |
| | | | GYIFTDYSIHWVRQAPGQGLEWMGW | | SGSIASNYVQWYQQRPGSAPTTVIY |
| | | | INPNSGGGNSAQIFKGRATMARDTS | | EDNQRPSGVPDRFSGSIDSSSNSAS |
| | | | ITTVYMDLSGLRSDDTAVYYCARGP | | LTISGLKTEDEADYYCQSYDSSNYW |
| | | | LFHKVVYESSSGFHDGLDFWGQGTM | | VFGGGTKLTVL |
| | | | VTVSS | | |
| | C875 | 79 | QVQLVQSGAEVKQPGASVKISCKAS | 80 | QSVLTQPPSVSGAPGQGVSISCTGS |
| | | | GYIFTTYFMHWVRQAPGQGLEWLGI | | SSNVGAGYGVHWYQQLPGTTPKLLI |
| | | | IDPTISGASLAQKFQGRVTMTSDTS | | YDNNSRPAGVPDRFSGSKSGTSASL |
| | | | TSTVYMEMRSLRSDDTALYFCARAS | | AIAGLQPEDEADYYCQSWDNGLSGS |
| | | | TSTSSWSEALSLGSWGQGTLVTVSS | | GVVFGGGTKVTVL |
| | C876 | 81 | EVQLVESGGGLIQPGGSLRLSCAAS | 82 | EIVMTQSPTTLSVSPGERATLSCRA |
| | | | EFVISRNYMSWVRQAPKKGLEWVSV | | SQSLSSNLAWYQQKPGQAPRLLIFG |
| | | | LYSGGSTFYADSVKGRFTISRDDSR | | VSTRATGIPARFSGSGSGTEFTLTI |
| | | | NMLYLQMNSLRAEDTAVYYCVRDFG | | SSLQSEDFAVYYCQQYYSGPRTFGQ |
| | | | EFYFDYWGQGVLVTVSS | | GTKVEIK |
| | C877 | 83 | EVQLVESGGGLIPPGGSLRLSCAAS | 84 | DIQLTQSPSFLSASVGDRVTITCRA |
| | | | GIIVSRNYMSWVRQTPGKGLEWVSV | | SQGISNYLAWYQQKPGKAPKLLIYA |
| | | | MYAGGTKEYADSVKGRFIISRDDSN | | ASTLQSGVPSRFSGSGSGTEFTLTI |
| | | | NTLYLQMNSLRAEDTAVYYCARDLI | | SSLQPEDFATYYCQLLNSYPMCSFG |
| | | | VLGVDVWGQGTTVTVSS | | QGTKLEIK |
| | C878 | 85 | EVQLVESGGGLVQPGGSLRLSCSVS | 86 | DIQMTQSPSSLSASVGDRVTITCRA |
| | | | GFTFSNFAMHWVRQAPGKGLEFVSG | | SQSISSFLNWYQQKPGKAPKLLIYA |
| | | | VSSDGDITDYADSVKGRFTISRDNS | | ASSLQSGVPSRFSGRGSGADFTLTI |
| | | | KNTLYLQMSSLRPEDTAVYYCVKDK | | TSLQPEDFATYFCQQSYSSHLTFGP |
| | | | EHSTMVTIFDFWGQGTLVTVSS | | GTKVDIK |
| | C879 | 87 | QVQLQESGPGLVKPSQTLSLTCGVS | 88 | NFMLTQPHSVSESPGKTVTISCTAS |
| | | | GDSISSGGHFWSWVRQHPGTGLEWI | | SGNIVNNYVQWYQQRPGSAPIIVIY |
| | | | AYSPFSGTTYYNPSLKSRVTLSVDT | | EDAQRPSGVPDRFSGSIDTSSNSAS |
| | | | SKNQFFLSLTSVTDADTAVYFCARV | | LTISGLKTEDEADYYCQSYEIDSHV |
| | | | KGWLRGYFDHWGQGVLVTVSS | | VFGGGTRLTV |
| | C880 | 89 | [sequence omitted] | 90 | EIVLTQSPGTLSLSPGERATLSCRA |
| | | | GGSFSDYYWSWIRQPPGKGLEWIGE | | SQSVSSAYLAWYQQKPGQAPRLLIY |
| | | | NNHSGKTNYNPSLENRVTISVDTSK | | GASSRATGIPDRFSGSGSGTDFTLT |
| | | | NQFSLKLTSVTAADTAVYYCARESG | | ISRLEPEDFAVYFCQQYAYTIWTFG |
| | | | SYGTFDYWGQGTLVTVSS | | QGTKVEIK |
| | C881 | 91 | EVQLVESGGGLIQPGGSLRLSCAVS | 92 | QSALTQPASVSGSPGQSITISCIGT |
| | | | GVAVSTNYMSWVRQAPGQGLEWVST | | SSDFENYNLVSWYQQHPGKAPKVMI |
| | | | IYSGDTTYYSDSVKGRFTISRDNSK | | YEDTKRPSGVSNRFSGSKSANTASL |
| | | | NTFYLQMNSLRVPDTAVYYCARLGG | | TISGLQAEDEAEYYCCSYAGASTWV |
| | | | VFNGFNGSFDYWGQGTLVTVS | | FGGGTRVTVV |
| | C882 | 93 | QVQLVESGGGVVQPGRSLRLSCAAS | 94 | DVVMTQSPLSLPVTLGQPASISCNS |
| | | | GFTFIRYNMHWVRQAPGKGLEWVAV | | SQSLVHTDGNTYLNWFQQRPGQSPR |
| | | | IWYDGSNKYYADSVKGRFTISRDNS | | RLIYKVSNRDSGVPDRFSGSGSDTD |
| | | | KNTLYLQMNSLRAEDTAVYYCARDP | | FTLQISRVEADDVGVYYCMQGSHWP |
| | | | MIVVVEMDYWGQGTLVTVSS | | YTFGQGTKLEIK |
| | C884 | 95 | QVQLQQWGAGLLKPSETLSLTCVVY | 96 | EIVLTQSPGTLSLSPGERATLSCRA |
| | | | GGSFSAYYWSWIRQPPGKGLEWIGE | | SQSVSSTYLAWYQQKPGQAPRLLIY |
| | | | INHSGSTNYKSSLQSRVTISVDTSK | | GASSRATGIPDRFSGSGSGTDFTLT |
| | | | NQFSLKLSSVTAADTAVYYCARETG | | ISRLEPEDFAVYYCQQYAFSVWTFG |
| | | | TYGTFDHWGQGTLVTVSS | | QGTKVEI |
| | C885 | 97 | QVQLQESGPGLVKPSQTLSLTCAVS | 98 | NFMLTQSHSVSESPGKTVTISCTGS |
| | | | GDSIRSGGYYWSWVRQHPGRGLEWI | | SGNIVNNYVQWYQQRPGSAPIIVIY |
| | | | GYIYFSGTTYYNPSLKSRVTISVDT | | EDTQRPSGVPDRFSGSIDTSSNSAS |
| | | | SEKQFSLKLTSVTDADTAVYFCARV | | LTISGLKTEDEADYYCQSYDSGSHV |
| | | | KGWLRGYFDYWGQGALVTVSS | | VFGGGTKLTV |
| | C886 | 99 | EVQLVESGGDLVQPGGSLRLSCAAS | 100 | DIQMTQSPSSLSASVGDRVSITCRA |
| | | | GFSVTTNAMAWVRQAPGKGLEWISY | | SQTINTHLSWYLQKPGEAPRLLVYA |
| | | | INIGSANIQYADSVKGRFTISRDNA | | ASTLHSGVPSRFSGSGSGTDFTLTI |
| | | | KNSLYLQMNSLRDEDTAVYYCARGD | | SSLQPEDFATFYCQQTYRFPLTFGG |
| | | | CTSSSCYSLDYWGQGALVTVSS | | GTKVEIK |
| | C887 | 101 | EVQLVESGGDLVQPGGSLRLSCAAS | 102 | DIQMTQSPSSLSASVGDRVTITCRA |
| | | | GFTFTTYSMSWVRQAPGKGLEWISY | | SQSITSYLSWYLQKPGEAPKLLIYA |
| | | | INSGSANIHYADSVKGRFTVSRDNA | | ASILQSGVPSRFGGNGSGTDFTLTI |
| | | | KNSLYLQMNSLRDEDTAVYYCARGD | | SSLQPEDFATFYCQQTYRSPLTFGG |
| | | | CLSSSCYSLDYWGQGALVTVSS | | GTKVEIK |
| | C888 | 103 | [sequence omitted] | 104 | QSALTQPASVSGSPGQSITISCTGT |
| | | | GFTVSSNYMSWVRQAPGKGLEWVSV | | SSDVGGYNYVSWYQQHPGKAPKLMI |
| | | | IYSGGSAYYADSVKGRFTISRDNSK | | YDVSNRPSGVSNRFSGSKSGNTASL |
| | | | NTLYLQMNSLRAEDTAVYYCARDLR | | TISGLQAEDEADYYCSSYTSSSSWV |
| | | | DQDGYSYGAFDYWGQGTLVTVSS | | FGGGTKLTVL |
| | C889 | 105 | [sequence omitted] | 106 | QSALTQPASVSGSPGQSITISCSGT |
| | | | GFTVSSNYMTWVRQAPGKGLEWVSL | | SSDVGAHNYVSWYQQYPGKAPKLMI |
| | | | IYSGTSAFYADSVKGRFTISRDNSK | | FDVTDRPSGVSNRFSGSKSGNTASL |
| | | | NTLYLQMSSLRVNDTAIYYCARDLR | | TISGLQAEDEADYYCTSYTTNRSWV |
| | | | KDDGYSYGAFDYWGQGTLVTVSS | | FGGGTKVTVL |
| | C890 | 107 | QVQLVQSGAEVKKPGSSVKASCKAS | 108 | EIVLTQSPGTLSLSPGERATLSCRA |
| | | | GGTFSTYTISWVRQAPGHGLEWMGR | | SQSVSSSYLAWYQQKPGQAPRLLIY |
| | | | IIPIFGTTKYAQKFQGRVTITADES | | GASSRATGIPDRFSGSGSGTDFTLT |
| | | | TTTAYLELSSLRSEDTAVYYCTINT | | ISRLEPEDFAVYYCQQYGSSLYTFG |
| | | | QWDLVPRWGQGTLVTVSS | | QGTKLEIK |
| | C891 | 109 | EVQLVESGGGLVKPGGSLRLSCAVS | 110 | NFMLTQPHSVSESPGKTVTISCTGS |
| | | | GFTFSNVWMSWVRQAPGKGLEWVGR | | SGSIASNYVQWYQQRPGSAPTTVIY |
| | | | IKSKTDGGTTDYAAPVKGRFTISRD | | EDNQRPSGVPDRFSGSIDSSSNSAS |
| | | | DSKNTLYLQMNSLKTEDTAVYYCTS | | LTISGLKTEDEADYYCQSYDSSLNW |
| | | | QLWLRGPGDYXGPGNPGHRLL | | VFGGGTKLTVL |
| | C892 | 111 | EVQLVESGGGLVKPGGSLKVSCTAS | 112 | NFMLTQPHSVSESPGKTVTISCTGS |
| | | | GFTFTDAWMSWVRQAPGKGLEWVGR | | SGSIASNYVHWYQQRPGGAPTTVIY |
| | | | IKSRAYGGTTDYGAPVQGRFTISRD | | EDNQRPSGVPDRFSGSIDISSNSAS |
| | | | DSINTLYLQMNSLTAEDTAVYYCTS | | LTISGLKTEDEGDYYCQSYDSGVNW |
| | | | QLWLRGPGDYWGQGTLVTVSS | | VFGGGTKLTVL |
| | C893 | 113 | EVQLVQSGAEVKKPGESLKISCKGS | 114 | EIVLTQSPATLSLSPGERATLSCRA |
| | | | GYYFTRQWIGWVRQMPGKGLEWMGI | | SQSVSSYLAWYQQRPGRAPRLLIYD |
| | | | IYPGDSDTRYSPSFQGQVTISADKS | | ASNRATGIPGRFSGSGSGTDFSLTI |
| | | | ISTAYLQWSSLKASDTAMYYCARGG | | SSLEPEDFAVYYCQQRSSWPLTFGQ |
| | | | WDPAEYSSSGGGGLDAFDIWGQGTM | | GTRLEIK |
| | | | VTVSS | | |
| | C894 | 115 | EVQLVQSGAEVKKPGESLRISCKGS | 116 | EIVLTQSPGTLSLSPGERATLSCTA |
| | | | GYSFTGYWISWVRQMPGKGLEWMGR | | DQSVPNSYLAWYQHKPGQAPRLLIY |
| | | | IDPSDSYTNYSPSFEGHVTFSADTA | | GASSRATGIPDRFSGSGSGIDFTLT |
| | | | LSTAYLQWSSLQASDTAIYFCGRIA | | ISRLEPEDFAVYYCQQYGSLLLTFG |
| | | | PPGRGSYYPTQNYMDVWGKGTTVTV | | GGTKVEIK |
| | | | SS | | |
| | C895 | 117 | [sequence omitted] | 118 | EIVLTQSPATLSLSPGERATLSCRA |
| | | | GGTFTSYAFSWVRQAPGQGLEWMGG | | SQSVGSYLAWYQQKPGQAPRLLIYD |
| | | | IIPIFGTTNYAQKFQGRVTITADES | | ASNRATGIPARFSGSGSGTDFTLTI |
| | | | TSTAYMELSSLRSEDTAVYYCARPE | | SSLEPEDFAFYFCQQRNSWPPEYSF |
| | | | GCGSRTSCTPGAYYYGMDVWGQGTT | | GQGTKLEIK |
| | | | VTVSS | | |
| | C896 | 119 | QVQLVESGGGVVQPGRSLKLSCAAS | 120 | DIQMTQSPSSLSASVGDRVTITCRA |
| | | | GFTFKTYGMHWVRQAPGKGLEWVAV | | SQTISSYLNWYQQKSGKAPELLVYD |
| | | | ISYDGTNDYYADSVKGRFTVSRDNS | | ASNLESGVPSRFSGSGSGTDFTLTI |
| | | | KNTLYLQMNSPRTEDTAVYYCAKAG | | SSLQPEDFATYYCQQSYSFGPGTKV |
| | | | GPYYYDTSGSFWYFDYWGQGTLVTV | | DIK |
| | | | SS | | |
| | C897 | 121 | QVQLVESGGGVVQPGRSLRLSCAAS | 122 | DIQMTQSPSSLSASVGDRVTITCQA |
| | | | GFIFSHYGMHWVRQAPGKGLEWVAV | | SQDIRDNLNWYQQKPGKAPQLLIYD |
| | | | ILYDGSDQYYADSVKGRFTISRDNS | | ASNLQPGVPSRFSGSGSGTHFTFTI |
| | | | KNTLFLEMNSLRLEDTAVYYCAKGG | | SRLQPEDIATYFCQQYANLPTTFGP |
| | | | GQYCSHGNCYLNYFDYWGQGALVTV | | GTKVDIK |
| | | | SS | | |
| VSS | | | | | |
| | C898 | 123 | [sequence omitted] | 124 | EIVLTQSPGTLSLSPGERATLSCRA |
| | | | GGPFSSYAFTWVRQAPGQGLEWMGG | | SQSVNSDYLAWYKQKPGQAPRLLIY |
| | | | IIATFGTVNYAQKFQGRVTITADEF | | GTSSRATGIPDRFSGSGSGTDFTLT |
| | | | TSTVNMELSSLRSDDTAVYYCARRD | | ISRLEPDDFAVYYCQQYGNSPRTFG |
| | | | CSTTSCYDEVLYRLVDWGQGTLVTV | | QGTKVEIK |
| | | | SS | | |
| | C899 | 125 | EVQLVESGGGLVKPGGSLRLSCAAS | 126 | QSALTQPRSVSGSPGQSVTISCTGS |
| | | | GFTFSNAWMSWVRQAPGKGLEWVGR | | NSDVGGYNYVSWYQQHPGKAPKLVI |
| | | | IKSKTDAETTDYAAPVRGRFTISRD | | YDVSLRPSGVPDRFSGSKSGITASL |
| | | | NSKNTLYLEMNSLKTEDTAVYYCTT | | TISGLQPEDEAHYYCCSFAGTYTPW |
| | | | DADYSDSSGYYVTYYFEYWGQGSLV | | VFGGGTRLTVL |
| | | | TVSS | | |
| | C900 | 127 | QVQLQESGPGLVKPSGTLSLTCTVS | 128 | DIQMTQSPSSLSASVGDRVTITCRA |
| | | | GGSINSRNWWSWVRQPPGKGLEWIG | | SQGISNSLAWYQLKPGKAPKLLLYA |
| | | | EIFHSGSTNYNPSLESRVAISIDKS | | ASTLESGVPSRFSGSGSGTNFTLTI |
| | | | HNHFSLKLTSVTAADTAVYYCARAN | | SSLQPEDFASYCCQHYYSSPRTFGQ |
| | | | GILDFWGQGTLVTVSS | | GTKVEI |
| | C901 | 129 | QVQLVESGGGVVQPGRSLRIACGAS | 130 | DIQMTQSPSSLSASVGDRVTITCRA |
| | | | GFTFSTYDMHWVRQAPVKGLEWVAV | | SQSISTYLNWYQQKPGKAPSLLIYA |
| | | | ISRDGSGKFYADSVKGRFTISRDNS | | ASSLYSGVPSRFSGSGSGTDFSLTI |
| | | | KKTLYLQMDSLRPEDTAMYYCARDF | | SSLQPEDFATYYCQQTYTTPTWTFG |
| | | | ESRTWDPPKYYYALDVWGQGTTVTV | | QGTKVEIK |
| | | | SS | | |
| | C902 | 131 | EVQLVQSGAEVKKPGESLRISCKGS | 132 | DIQLTQSPSFLAASAGDRVTITCRA |
| | | | GYSFHTYWIHWVRQMPGKGLEWMGK | | SQGISSYLAWYQQKPGKAPKVLIYA |
| | | | IDPSDSYTNYSPSFQGHVTFSADRS | | ASTLQSGVPSRFSGSGSGTEFTLTI |
| | | | ISTAYLQWSSLKASDTATYYCARLS | | SSLQPEDCATYYCQQFNSDPLTFGG |
| | | | WSPPTRTTDEKNWFDPWGQGTLVTV | | GTKVEIK |
| | | | SS | | |
| COV57 | C952 | 133 | EVQLVQSGAEVKKPGESLTISCKDS | 134 | QSVLTQPPSVSGAPGQRVTISCTGS |
| | | | GNSFTIYWIGWVRQMPGKGLEWMGM | | SSNIGAGFDVHWYQQLPGTAPKLLI |
| | | | IYPGDSGTRYSPSFEGQVTISADES | | YGNNNRPSGVPDRFSGSKSATSASL |
| | | | INTAYLQWRSLKASDTAMYYCVRGI | | AITGLQAEDEADYYCQSSDSSLSGL |
| | | | AVDWYFDLWGRGTLVTVSS | | YVFGTGTNVIV |
| | C953 | 135 | [sequence omitted] | 136 | DIVMTQSPLSLPVTPGEPASISCRS |
| | | | GGTFSSYAISWVRQAPGQGLEWMGR | | SQSLLHSNGYNYLDWYLQKPGQSPQ |
| | | | IIPILGIANYAQKFQGRVTITADKS | | LLIYLGSNRASGVPDRFSGSGSGTD |
| | | | TSTAYMELSSLRSEDTAVYYCARDS | | FTLKISRVEAEDVGVYYCMQALQTP |
| | | | EYSSSWYSRGYYGMDVWGQGTTVTV | | PTFGGGTKVEIK |
| | | | SS | | |
| | C954 | 137 | [sequence omitted] | 138 | DIVMTQSPLSLPVTPGEPASISCRS |
| | | | GDTFTNYAFSWMRQAPGQGLEWMGR | | SQSLLHGDGYNYLDWYLQKPGQSPH |
| | | | IIPILGIVKYSQKFQDRVRISADKS | | LLIYLGSNRTSGVSDRFSGSGSGTD |
| | | | TSTAYMDLSSLRSEDTAMYYCARDS | | FTLKISRVEAEDVGVYYCMQALQTP |
| | | | EFSTSWFSRGYHGMDVWGQGTTVTV | | PTFGGGTKVEIK |
| | | | SS | | |
| | C955 | 139 | [sequence omitted] | 140 | QSVLTQPPSVSGAPGQRVTISCTGS |
| | | | GGTFSGYSWTWIRQPPGKGLDWIGE | | SSNIGAGYDVHWYQQLPGTAPKVLI |
| | | | INHSGSTNYNPSLKSRVTISVDTSK | | YGNNNRPSGVPDRFSGSKSGTSASL |
| | | | NQFSLKLSSVTAADTAVYYCARAGF | | AITGLQAEDEADYYCQSYDTSLSGS |
| | | | GFVITSRSGTDPLFDYWGQGTLVTV | | RVFGGGTKLTVL |
| | | | SS | | |
| | C956 | 141 | EVQLVESGGGLVQPGRSLRLSCTGS | 142 | QSVLTQPPSASGTPGQRVTISCSGS |
| | | | EFTFGDFSMSWFRQAPGKGLEWVGF | | SSNIGSNPVNWYQQLPGTAPKLLIY |
| | | | IRRKADGGTTEYAASVRGRFTISRD | | SNNRRPSGVPDRFSGSKSGASASLA |
| | | | DSKSIAYLVMNSLKSEDTAVYYCTR | | ISGLQSEDEAAYYCAAWDDSRKGPV |
| | | | AWIPTPHDYWGQGVLVTVSS | | FGGGTKLTV |
| | C957 | 143 | EVQLVESGGGLVQPGRSLRLSCTAS | 144 | QSVLTQPPSASGTPGQRVTISCSGG |
| | | | GFTFADFSMTWFRQAPGKGLEWVGF | | SSNIGSNPVNWYQQLPGTAPKLLIY |
| | | | IRREADGGTTEYAASVRGRFTISRD | | SNNQRPSGVPDRFSGSKSGASASLA |
| | | | DSKGIAYLLMNSLKSEDTAMYYCSR | | ISGLQSEDEADYYCAAWDDSLKGPV |
| | | | AWIPTPHDYWGQGTLVTVSS | | FGGGTKVTV |
| | C958 | 145 | EVQLVQSGAEVKKPGDSLKISCKGS | 146 | QSVLTQPPSASGTPGQRVTISCSGS |
| | | | GYSFISHWIAWVRQKPGKGLEWMGI | | SSNIGSYTVNWYHQVPGTAPKVLIY |
| | | | IHPGDSDTRYSPSIQGQVTISADRF | | GNTQRPSGVPDRFSGSKSGTSASLA |
| | | | ITTAYLQWSSLQASDTAMYYCARRG | | ISGLQSEDEGDYYCAAWDDSLDGWM |
| | | | SSWEIDHWGQGTLVTVSS | | FGGGTTLTVL |
| | C959 | 147 | QVQLQESGPGLVKPSETLSLNCNVS | 148 | QSVLTQPPSVSAAPGQTVTISCSGS |
| | | | GGSISNYYWSWIRQPPGKGLEWIGF | | SSNIRNNFVSWYQQFPGTAPKLLIY |
| | | | ISYSGSTDYNPSLKSRVIISIDTSK | | DNNKRPSGIPDRFSGSKSGTSATLG |
| | | | KHFSLNLSSVTAADTAVYFCARHYD | | ITGLQTGDEADYYCGTWDSSPSACW |
| | | | ILTALSWFDPWGQGTLVTVSS | | VFGAGTKLTV |
| | C960 | 149 | QVQLVESGGGVVQPGRSLTLSCTAS | 150 | NFMLTQPHSVSESPGKTVTISCTGS |
| | | | GFTFNRFAMFWVRQAPGKGLEWVAV | | SGSIANNYVQWYQQRPGSAPTTVIF |
| | | | ISFDGSYEHYAESVKGRFAIFRDNP | | EDTQRPSGVPDRFSGSIDSSSNSAS |
| | | | KNTLYLQMNSLRAEDTAVYYCAKSP | | LNISGLKPEDEADYYCQSFDVNSRW |
| | | | INYCANGVCYPDSWGQGTLVTVSS | | VFGGGTKLTVL |
| | C961 | 151 | [sequence omitted] | 152 | DIQMTQSPSSLSASVGDRVTITCQA |
| | | | GIIVSNNYMSWVRQAPGKGLEWVST | | SQDISKYLNWYQQKPGTAPKLLIYD |
| | | | IFSGGSTYYADSVKDRFTISRDNSN | | ASELERGVPSRFSGSGSGTDFTFTI |
| | | | NTLYLQMNSLRPEDTAVYYCTRLGG | | ISLQPEDIATYYCLQYDNLPYTFGQ |
| | | | YRYGMDVWGQGTTVTVS | | GTKLEIK |
| | C962 | 153 | EVQLVESGGGLVQPGGSLRLSCTAS | 154 | DIQMTQSPSSLSASVGDRVTITCQA |
| | | | RLTVSSNYMNWVRQAPGKGLEWVSV | | SQDISNYLNWYQQSPGKAPKLLIYD |
| | | | IYAGGSTFYADSVKDRFTISRDNSM | | ASKLETGVPSRFSGSGSGTDFTFTI |
| | | | NTLYLQMNSLRVEDTAVYYCARLGG | | SSLQPEDIATYYCLQYDNLPYSFGQ |
| | | | YRYGMDVWGQGTTVTV | | GTKLEI |
| | C963 | 155 | QVQLVQSGAEVKKPGSSVRVSCKAS | 156 | QSVLTQPPSVSGAPGQRVTISCTGS |
| | | | GGTFSSFTITWVRQAPGQGLEWMGR | | SSNIGAGYDVHWYQQLPGTAPKLLI |
| | | | IIPNLNIPNYAQRFQGRITITAEKS | | SGHINRPSGVPDRFSGSTSGTSASL |
| | | | TSTAYLELSSLRSEDTAVYYCARGV | | AITGLQAEDEADYYCQSYDSSLSDS |
| | | | GYSGSGSNWYFDLWGRGTLVTVSS | | VFGGGTKLTV |
| | C964 | 157 | [sequence omitted] | 158 | DIQMTQSPSSLSASVGDRVTITCRA |
| | | | GFTFDDYGMHWVRQAPGKGLEWVSG | | SQGISNYLAWYQQSPGKVPKLLIYA |
| | | | ISWNSGSIAYAEFVKGRFTISRDNA | | ASTLQSGVPSRFSGSGSGTDFTLTI |
| | | | KNSLYLQMNSLRTEDTALYYCAKAV | | SSLQPEDVATYYCQKYNSGPALTFG |
| | | | PTSCYVFCALDIWGQGTMVTVSS | | GGTKVEIK |
| | C965 | 159 | EVQLVESGGGLVKPGRSLRLSCSAS | 160 | EIVMTQSPATLSVSPGERATLSCRA |
| | | | GFTFGDYAMTWFRQAPGKGLQWVGF | | SQSVSSNLAWYQQKPGQAPRLLIYG |
| | | | IRSKPFGGTTQYAASVKGRFTISRD | | ASIRATGIPARFSGSGSGTEFTLTI |
| | | | DSNNVAYLQMNSLKTEDTGVYYCTR | | SSLQSEDFVVYYCQEYDNWFAFGGG |
| | | | LRQVQGVPGYYFDQWGQGALVTVSS | | TKVEIK |
| | C966 | 161 | EVQLVESGGGLIQPGGSLRLSCAAS | 162 | DIQMTQSPSSLSASVGDRVTITCRA |
| | | | GFTFSSYDMHWVRQVTGKGLEWVSA | | SQSIGRHLSWHQQKLGKAPKLLIYS |
| | | | IGTAGDRYYLDSVKGRFTISRENAK | | ASSLQSGVPSRFSGSGSGTDFTLTI |
| | | | NSLHLQMNNLRVGDTAVYYCARASG | | SSLQPEDFATYYCQQSYETPPWTFG |
| | | | VLTTHFDSWGRGTLVTVSS | | QGTKVEIK |
| | C967 | 163 | QVQLVESGGGVVQPGRSLRLSCAAS | 164 | DIQMTQSPSSLSASVGDRVTITCRA |
| | | | GFTFRIYAMHWVRQAPGKGLEWVAI | | SQTISTFLNWYRQIPGKAPKLLIYA |
| | | | IWNDGSKQYYADSMKGRFTISRDNS | | ASSLQSGVPSRFSGSGSGTDFTLTI |
| | | | KNTLYLQMNSLRDEDTALYYCAREG | | SSLQPEDFATYYCQQTYSTPYTFGR |
| | | | VALAGNGVDGFDIWGQGTMVTVSS | | GTKLEIK |
| | C968 | 165 | QVQLVESGGGVVQPGRSLRLSCAAS | 166 | DIQMTQSPSSLSSSVGDRVTITCRA |
| | | | GFTFRIYAMHWVRQAPGKGLEWVAI | | SQSIGIYLNWYQQKPGKVPNLLIYA |
| | | | IWNDGNKKDYVDSVKGRFTISRDNS | | ASTLQTGAPSRFSGSGSGTDFILSI |
| | | | RNTVYLQMNSLRVDEDTAVYYCARE | | SSLQPEDFATYYCQQTYSVPYTFGQ |
| | | | GVAVGGNGVDGFDMWGQGTMVTVSS | | GTKLEIK |
| | C969 | 167 | QVQLQESGPGLVKPSETLSLTCTVS | 168 | SYELTQPPSVSVSPGQTASITCSGD |
| | | | GGSISSYYWSWIRQPPGKGLEWIGY | | KLGDKYACWYQQKPGQSPVLVIYQD |
| | | | IYYSGSTNYNPSLKSRVTISVDTSK | | SKRPSGIPERFSGSNSGNTATLTIS |
| | | | NQFSLKLSSVTAADTAVYYCARLLS | | GTQAMDEADYYCQAWDSSTAYVFGT |
| | | | TEWLFNWFDPWGQGTLVTVSS | | GTKVTVL |
| | C970 | 169 | QVQLQESGPGLVKPSETLSLTCTVS | 170 | SYELTQPPSVSVSPGQTASITCSGD |
| | | | GDSINKYYWGWIRQPPGKGLEWIGY | | TLGDKYACWYQQKPGQSPLLVIYQN |
| | | | IYYSGTTNYNPSLKSRVTISVDTSK | | NKRPSGIPERFSGSNSGNTATLTIS |
| | | | TQFSLKLSSVTAADTAVYYCARLLS | | GTQAMDEADYYCQAWDSSTAYVFGT |
| | | | TEWSFNWFDPWGQGTLVTVSS | | GTKVTVL |
| | C971 | 171 | EVQLVESGGGLVKPGGSLRLSCAAS | 172 | EIVLTQSPGTLSLSPGERATLSCRA |
| | | | GFTFNNAWMTWVRQAPGKGLEWVGR | | TQAISSTYLAWYQQKPGQAPRLLIY |
| | | | IKSKTDGGTTDYGTPAKGRFTISRD | | GAFSRAPGIPDRFSGSGSETDFTLT |
| | | | DSKNTLYLQMKSLRTEDTAVYYCTT | | ISRLEPEDFAVYYCQQSDRSPFTFG |
| | | | VDVQGIWELLENDAFDIWGQGTMVT | | PGTKVDIK |
| | | | VSS | | |
| | C972 | 173 | [sequence omitted] | 174 | DIQLTQSPSFLSASVGDRVTITCRA |
| | | | EFIVSRNYMSWVRQAPGKGLEWVSL | | SQGISSYLAWYQQDPGKAPKLLIYA |
| | | | IYPGGSTYYPDSVKGRFTISRDNSK | | ASTLQSGVPSRFSGSGSGTEFTLTI |
| | | | NTLYLQMNSLRGEDTAVYYCARDLG | | SSLQPEDFATYYCQQLDSYPPGYSF |
| | | | DSRLDYWGQGALVTVSS | | GQGTKLEIK |
| | C973 | 175 | EVQLVESGGGLEKPGRSLRLSCIGS | 176 | QTVVTQEPSLTVSPGGTVTLTCGSS |
| | | | GFTFGDYAMGWFRQAPGKGLEWVGF | | TGTVTSGQYPYWFQQKPGQAPKTLI |
| | | | IRSKAYGGASEYAASVKGRFTISRD | | YDTSSKHSWTPARFSGSLLGGKAAL |
| | | | DSKSIAYLQMNSLKTEDTAVYFCTR | | TLSGAQPEDEAEYYCLISYSGAWVF |
| | | | RAHYSGSGLSSYVDYWGQGTLVTVS | | GGGTKLTVL |
| | | | S | | |
| | C974 | 177 | EVQLVESGGDLTQPGGSLRLSCAAS | 178 | DIQMTQSPSSLSASVGDRVTITCRT |
| | | | GFTFSNYDMHWVRQATGKGLEWVSG | | SQTISTYLNWYQQKPGKAPKVLIFA |
| | | | IGTSGDTYYADSVKGRFTISRENAK | | ASSLQSGVPSRFSGSGSGTDFTLTI |
| | | | NSLFLQMNHLRAGDTATYYCARTEY | | SSLQPEDFATYFCQQSYSAPPWTFG |
| | | | AWGSYRSYWYFDLWGRGTLVTVSS | | PGTKVEIK |
| | C975 | 179 | EVQLVESGGDLTQPGGSLRLSCAAS | 180 | DIQMTQSPSSLSASVGDRVTITCRT |
| | | | GFTFSSYDMHWVRQATGKGLEWVSG | | SQTISTYLNWYQQKPGKAPKVLIYA |
| | | | IGTSGDTYYADSVKGRFTISRENAK | | ASSLQSGVPSRFSGSGSGTDFTLTI |
| | | | NSLFLQMNNLRAGDTATYYCARTEY | | SSLQPEDFATYFCQQSYSAPPWTFG |
| | | | AWGSYRSYWYFDLWGRGTLVTVSS | | PGTKVEIK |
| | C976 | 181 | EVQLVESGGALIQPGGSLRLSCAAS | 182 | SYELTQPPSVSLAPGQTARITCGGN |
| | | | GFTVSSNDMTWVRQAPGKGLEWVSV | | GIGSKSVHWYQQKPGRAPVLVVYDD |
| | | | IYTGGGTYHADSAKGRFIISRHNSK | | SVRPSGTPARFSGANSGNTATLTIS |
| | | | NTLSLQMNDLRAEDTAVYYCARLTM | | RVEAGDEADYYCQVWDSFRDHQDWV |
| | | | TTYYFDSWGQGTLVTVSS | | FGGGTKLTVL |
| | C977 | 183 | [sequence omitted] | 184 | DIQMTQSPSSLSASVGDRVTITCRA |
| | | | GFTFSNYDMHWVRQVTGKGLEWVSL | | SQSVTRYLNWYQLKPGKAPKLLIYA |
| | | | IGTAADAYYADSVKGRFTISRENAK | | ASSLQSGVPSRFSGSGSGTDFTLTI |
| | | | NSLYLQINSLRAGDTAVYFCARGDS | | SSLQPEDFATYYCQQSYSTLGLTFG |
| | | | SGLYTFFDYWGQGTLVTVSS | | GGTKVEI |
| | C978 | 185 | [sequence omitted] | 186 | QSVLTQPPSVSGAPGQRVTISCTGT |
| | | | GATFSNYIISWVRQAPGQGLEWMGR | | NSNIGAGYDIHWYQQLPGTAPKLLI |
| | | | TIPLLDIANYAQKFQGRVTITADKS | | YGSNNRPSGVPDRFSGSKSGTSASL |
| | | | TRIVYMHLGSLTSEDTAVYYCATGK | | AITGLQAEDEADYYCQSYDSSLSGS |
| | | | GYSSSSAAYYFDHWGQGTLVTVSS | | EVFGGGTKLTVL |
| | C979 | 187 | QVQLVESGGGVVQPGRSLRLSCVAS | 188 | QSALTQPASVSGSPGQSITISCTGT |
| | | | GFTFSNYGMHWVRQAPGKGLEWVAV | | NSDVGGYDYVSWYQQHPGKAPKLII |
| | | | ILYDGSDKYYLDSVKGRFTISRDNS | | FEVINRPSGVSNRFSGSKSGNTASL |
| | | | KNTLFLQLNSLRAEDTAVYYCAKEG | | TISGLRAEDEADYYCCSYTTSTTRV |
| | | | NGYGYQYAGMDVWGQGTTVTVS | | FGGGTKLTVL |
| | C980 | 189 | QVQLVQSGAEVKKPGSSVKVSCEAS | 190 | EIVMTQSPATLSVSPGERATLSCRA |
| | | | GGTFSSDSINWVRQAPGQGLEWMGR | | SESVSSKLAWYQQKPGQAPRLLIYG |
| | | | IIPIFGATNYAQKFQGRVTITADKS | | ASTRATGISARFSGSGSGTDFTLTI |
| | | | TDTVYMEVSSLTSEDTAVYYCARGG | | SSLESEDFAVYYCQQYNHWPPNTFG |
| | | | IAVGGWWFDPWGQGTLVTVSS | | QGTKLEIK |
| | C981 | 191 | [sequence omitted] | 192 | DIQMTQSPSSLSASVGDRVTITCRA |
| | | | GFTFSNYDMHWVRQVTGNGLEWVAA | | SQSISSHLNWYQQKPGKVPKLLIYA |
| | | | IGTSGDTYYPDSVKGRFTISRENVK | | ASTLQSGVPSRFSGSGSGTDFTLTI |
| | | | NSLFLQMNSLRAGDTAVYYCARGGS | | SSLQPEDFATYYCQQSYSMPPVTFG |
| | | | SSWLWYFDLWGRGTLV | | QGTRLEIK |
| | C982 | 193 | [sequence omitted] | 194 | DIQMTQSPSSLSASVGDRVTITCRA |
| | | | GFTFSNYDMHWVRQPTGGGLEWVSA | | SQNISRYLNWYQQKPGKAPRLLIYA |
| | | | IGTAGDTYYLASVKGRFTISRENAK | | ASTLQSGVPSRFSASGSGTDFTLTI |
| | | | NSLSLQMNSLRAGDTAVYYCVRGDT | | TNLQPEDFAVYYCQQTYVMPPYTLA |
| | | | LVQGVIKAYYYYFMDVWGQGITVTV | | QGTKLEIK |
| | | | SS | | |
| | C983 | 195 | QVQLVESGGGVVRPGRSLRLSCAAS | 196 | DIQMTQSPSSLSAYVGDRVTITCQA |
| | | | GFTFSKYGMHWVRQAPGKGLECVAS | | SQDISNHLNWYQQKPGKAPNLLIYD |
| | | | IAYDGSDDSYADSVKGRFIISRDNS | | ASNLETGVPSRFSGSGSGTDFSFTI |
| | | | KNTLYLQMNSLRAADTAVYYCAKVL | | SSLQPEDIATYYCQQYDNVPPWTFG |
| | | | GSYCSASSCHGQRPDYWGQGTLVTV | | QGTKVEIK |
| | | | SS | | |
| | C984 | 197 | QVQLVQSGTEVKKPGDSVQVSCKTS | 198 | QSALTQPASVSGSPGQSITISCTGT |
| | | | GYSFTGYYIHWVRQAPGQGLEWMGR | | SSDVGGYYYVSWYQQHPGKAPKLMI |
| | | | INPNSGGTNYAQKFQGRVIMTRDTS | | YDVSSRPSGVSNRFSGSKSGNTASL |
| | | | ITTAFMELTRLRYDDTAVYFCAREP | | TISGLQAEDEADYYCSSYTSSNTLV |
| | | | IEGVIGGMIVNYYYMDVWGRGTTVT | | VFGGGTKLTVL |
| | | | VSS | | |
| | C985 | 199 | [sequence omitted] | 200 | QSALTQPASVSGSPGQSITISCTGT |
| | | | GYIFTGYYMHWVRQAPGQGLEWMGR | | SSDVGGYNYVSWYQQHPGKAPKLMI |
| | | | INPNSGGSRYAEKFQGRVTMTRDTS | | YDVTSRPSGVSDRFSGSKSGTTASL |
| | | | IITAFMELRGLKSDDTAVYYCAREP | | TISGLQAEDEADYYCSSFTSAFTLV |
| | | | IEAVPAGIIVNYYYMDVWGNGTTVT | | VFGGGTKLTVL |
| | | | VSS | | |
| | C986 | 201 | EVQLVQSGAEVKKPGETLKISCKGS | 202 | QSVLTQPPSVSGAPEQRVTISCTGS |
| | | | GDSFSNYWIGWVRQSPGKGLEWMAI | | SSNIGAGHDVHWYQQLPGTAPKLLI |
| | | | VYPGDSDARYSPSFQGQVTISADKS | | YNNNNRPSGVPDRFSGSKSGASASL |
| | | | VTTAYLKWSSLKASDTAIYYCVRGL | | AISGLQAEDEAEYYCQSYDKSLSVL |
| | | | PVDWYFDLWGRGTLVTVSS | | YVLGTGTKVTV |
| | C987 | 203 | QVQLQESGPGLVKPSETLSLTCNVS | 204 | SYELTQPPSVSVSPGQAASITCSGD |
| | | | GDIINKYYWSWIRQSPGKGLEWIGY | | KLGDKFACWYQQKPGQSPVLVIYQN |
| | | | IYYSGTTYYNPSLKSRVTMSVGTSK | | DKRPTGIPERFSGSNSGNTATLTIS |
| | | | QQFSLRLTSVTAADTAVYYCARMLS | | GTQAMDEADYFCQAWDSTSASVFGT |
| | | | TEWSFNWFDPWGPGTLVTVSS | | GTKVTVL |
| | C989 | 205 | QVQLVQSGPEVKKPGSSVKVSCKAS | 206 | QSVLTQPPSVSGAPGQRVTISCTGS |
| | | | GGNFNSYTITWVRQAPGHGLEWMGR | | SSNVGAGYDVHWYQQLPGTAPKLLI |
| | | | IIPTLGVANYALNFQDRITITADKS | | YRNNNRPSGVPDRFSGSKSGSSASL |
| | | | TSTAYMDLSSLRSEDTAVYYCARET | | DITGLQAEDEADYYCQSYDSSLSDS |
| | | | GYSGFLAVAYMDVWGNGTTVTVSS | | VFGGGTKLTV |
| | C990 | 207 | EVQLVESGGGLVRPGGSLRLSCAAS | 208 | QSALTQPASVSGSPGQSITISCTGT |
| | | | GFTVGSNFMSWVRQAPGKGLEWVSL | | SSDVGAYNYVSWHQHHPGKAPKLII |
| | | | IYSGGGTHYAESVKGRFTISRDKSK | | YDVSNRPSGVSNRFSGSKSGNTASL |
| | | | NTLYLQMNSLRAEDTAVYYCANQGY | | TISGLQAEDEADYYCTSYTNTTTPW |
| | | | YYYMDVWGKGTTVTVS | | VFGGGTKLTVL |
| | C991 | 209 | QVQLQESGPGLVKPSQTLSLTCTVS | 210 | SYELTQPPSVSVAPGQTARITCGGN |
| | | | GGSISSGGYFWSWIRQHPGKGLEWL | | NIGSKSVHWYQQKPGQAPVMVVYDD |
| | | | GYNYYTGTPHYNPSLKSRLVISIDT | | SDRPSGIPERFSGSNSGDTATLTIS |
| | | | SKNQFSLKLSSVTAADTAVYYCARG | | RVEAGDEADYSCQVWDRSSDHPWVF |
| | | | DTFGRGYYFDYWGQGTLVTVSS | | GGGTKLTVL |
| | C992 | 211 | QVQLQESGPGLVKPSQTLSLTCTVS | 212 | SYELTQPPSVSVAPGQTARITCGGN |
| | | | GGSISNGGYFWTWIRQHPVKGLEWI | | NIGTNSMHWYQQKPGQAPVLVVFDD |
| | | | GYIYYSGSPHYNPSLKSRLSISLDT | | SDRPSGIPERFSGSNSGNTATLTIS |
| | | | FKNQFSLNLSSVTAADTAVYYCARG | | RVEAGDEADYHCQVWDRSSDRPWVF |
| | | | DTFGRGYYFDFWGQGTLVTVSS | | GGGTKLTVL |
| | C993 | 213 | EVQLLESGGGLVQPGGSLRLSCAAS | 214 | QSALTQPPSASGSPGQSVTISCTGT |
| | | | GFPFSIYAMSWVRQAPGKGLEWVSG | | SGDVGGYNYVSWYQQHPGKAPKLMI |
| | | | MRGTTGTTYYADSVKGRFAISRDNS | | YEVSKRPSGVPDRFSGSKSGNTASL |
| | | | KNMLHLQMNSLRAEDTAVYYCAKSD | | TVSGLQAEDEADYYCNSYAGSNNWV |
| | | | HGDYVIGAFDIWGQGTMVTVSS | | FGGGTKLTVL |
| | C994 | 215 | QVQLQESGPGLVKPSGTLSLTCAVS | 216 | DIQMTQSPSSLSASVGDRVTITCRA |
| | | | GVSISNTNWWNWVRQPPGKGLEWIG | | SQSITDHLNWYQQKPGKAPKLLIYA |
| | | | EIYHTGSARYNPSLRSRVTISVDKS | | ASSLQTGVPSRFSGSGSETDFTLTI |
| | | | KNQFSLRLNSATAADTAIYYCARAQ | | STLQPEDFATYYCQQSYGPPTYSFG |
| | | | TPEFGELLYWGQGALVTVSS | | QGTKLEIK |
| | C995 | 217 | EVQLVESGGGLIQPGRSLRLSCTAS | 218 | EIVMTQSPATLSVSPGERATLSCRA |
| | | | GFSVGDYAMSWFRQAPGKGLEWVGF | | TESVYSNLAWYQQKPGQAPRLLMYD |
| | | | LRNQHYGGTAEYAASVKGRFSISTD | | ASTRAPGIPARFSGSGSGTEFTLTI |
| | | | ASKNIVYLQMDSLKTEDTAVYYCAR | | SSLQSEDFATYYCQQYSNWPPITFG |
| | | | NDRYIVIVPAEMLYWGQGTLVTVSS | | QGTRLEIK |
| | C996 | 219 | EVQLVESGGGLVQPGGSLRLSCVAS | 220 | SYELTQPPSVSVAPGQTARITCGGN |
| | | | GFTSTNYDMHWVRQAPGRGLQWVSS | | NIGNKSVYWYQQKPGQAPVLVVYDD |
| | | | IGTAGDTYYPGSVRGRFTISRENAK | | SGRPSGIPERFSGSNSANTATLTIS |
| | | | NSLDLQMNSLRVGDTAVYYCARGQR | | RVEAGDEADYYCQVWDNNSDQFGGG |
| | | | GYYDRSGYYWGWRAFDIWGQGTMVT | | TKLTVL |
| | | | VSS | | |
| COV72 | C997 | 221 | EVQLLESGGGLVQPGGSLRLSCAAS | 222 | EIVLTQSPGTLSLSPGERGTLSCRA |
| | | | GFTFSKDAMSWVRQAPGKGLEWVST | | SQRVPSSQLAWYQQKSGQAPRLLIY |
| | | | VTGSGTNTYYADSVKGRFTISRDNS | | GASSRASGIPDRFSGSGSGTDFTLN |
| | | | NNTLYLQMNSLRAEDTAVYYCANHP | | ISRLEPEDFAVYYCQQYGSLRALTF |
| | | | LGAAEGYYYYYMDVWGKGTTVTVSS | | GGGTKVEIK |
| | C998 | 223 | QVQLVQSGAEVKKPGASVKVSCKTS | 224 | DIQMTQSPSTLSASVGDRVTITCRA |
| | | | GYTFISYYIHWVRQAPGQGLEWMGI | | SQSISNWLAWYQQKPGKAPKLLIYK |
| | | | INPDGDNTNYAQKFQGRVTMTRDTS | | ASSLESGVPSRFSGSGSGTEFTLTI |
| | | | TSTVYMELSSLRFEDTAVYYCARGG | | SSLQPDDFATYYCQEYNSYYFGQGT |
| | | | AIPALRTAFDIWGQGTMVTVSS | | KLEIK |
| | C999 | 225 | QVQLVQSGAEVRRPGASVKVSCKAS | 226 | DIQMTQSPSTLSASVGDRVTITCRA |
| | | | GYTLTHYYIHWVRQAPGQGLEWVGI | | SQSINNWLAWYQQKPGKAPKLLIYK |
| | | | INPDGDNTNYAQKFQGRVTMTRDTS | | ASTLESGVPSRFSGSGSGTEFTLTI |
| | | | TSTVYMELSSLRSEDTAIFYCARGG | | SSLQPDDFATYYCQQYNSYFFGQGT |
| | | | AIPALRSAFDIWGQGTMVTVSS | | KLEIK |
| | C1000 | 227 | QVQLQESGPGLVKPSQTLSLSCTVS | 228 | QSALTQPRSVSGSPGQSVTISCTGT |
| | | | GGSISSDDYYWSWIRQPPGKGLEWI | | SSDVGGYSFVSWYQQHPGKAPKVLI |
| | | | GYIYYSGSTYYNSSLKSRVSISVDT | | YDVDKRPSGVPDRLSGSKSGNTASL |
| | | | SKNQFSLKLSSVTAADTAVYYCARW | | TISGLQAEDEADYYCCSYAGSYTLI |
| | | | KRWLQFLYFDYWGQGTLVTVSS | | FGGGTKLTVL |
| | C1001 | 229 | QVQLQESGPGLVKPSQTLSLTCTVS | 230 | QSALTQPRSVSGSPGQSVTISCTGT |
| | | | GGSISSGDYYWTWIRQPPGKGLEWI | | SSDVGSYDYVSWYQQHPGKAPKVMI |
| | | | GYIFYSGITYYSPSLKSRLTMSIDT | | YGVDERPSGVPHRFSGSKSGNTASL |
| | | | SKSQFSLNLSSVTAADTAVYYCARW | | TISGLQADDEADYFCCFYAGSYTLL |
| | | | KRLLQSLHFDYWGQGILVTVSS | | FGGGTKVTVL |
| | C1002 | 231 | [sequence omitted] | 232 | DIQMTQSPSSLSASVGDRVTITCQA |
| | | | EFIVSSNYMTWVRQAPGKGLEWVSI | | SQDINNYLNWYQQKPGKAPKLLIYD |
| | | | MYPGGSTFYADSVKGRFTISRDNSK | | ASNLETGVPSRFSGSGSGTDFSFTI |
| | | | NTLYLQINRLRAEDTAVYYCARDIA | | SSLQPEDIATYYCQQYDNLSRLTFG |
| | | | GRLDYWGQGTLVTVSS | | GGTKVEIK |
| | C1003 | 233 | QVQLVESGGGVVQPGRSLRLSCAAS | 234 | DIQMTQSPSSLSASVGDRVTITCQA |
| | | | GFAFSSYGMNWVRQAPGKGLEWVTT | | SQDISNYLNWYQQKPGKAPKLLIYD |
| | | | VSSDGNVNYYIDSVKGRFTISRDNS | | ASNLETGVPSRFSGSGSGTDFTFTI |
| | | | KNTLYLQMNSLRGDDTAVYYCAKGP | | TSLQPEDIATYYCQQYDNLPITFGQ |
| | | | RFGWSYRGGSGFDIWGQGTMVTVSS | | GTRLEIK |
| | C1004 | 235 | [sequence omitted] | 236 | QSALTQPASVSGSPGQSITISCTGT |
| | | | GYSFATYYIHWVRQAPGQGLEWMGI | | SRDIGFYKYVSWYQQHPGKAPKLII |
| | | | IDPSGGSTNYAQKFQGRVTMTRDTS | | YDVTNRPSGVSNRFSGSKSGNTASL |
| | | | TSTVYLELSSLRSEDTAVYYCARAD | | TISGLQAEDEAHYHCSSYSTAYVHV |
| | | | TPIVVDTTSYFYYMDVWGKGTTVTV | | LFGGGTRLTVL |
| | | | SS | | |
| | C1006 | 237 | QVQLVQSGAEVRKPGSSVKVSCKAS | 238 | DIQMTQSPSSLSASIGDRVTITCRA |
| | | | GGPFDQYTFSWVRQAPGQGLEWMAR | | SQGISYYLAWFQQKPGEAPRSLIYD |
| | | | ITPVVDLTNYAQKFQGRITIITDKS | | ASSLQSGVPSKFSGSGSGTDFTLTI |
| | | | TSTAYMELSSLRSEDTAIYYCATPL | | SSLQPEDSATYYCQQYNSYPLTFGG |
| | | | NDYYASGNLGLWGQGTLVTVSS | | GTKVEIK |
| | C1007 | 239 | QVQLVQSGSEMKKPGSSVKVSCKAA | 240 | DIQMTQSPSSLSASIGDTVTITCRA |
| | | | GGTLNTHTFSWVRQAPGQGLEWMGR | | SQGISYYLAWFQRKPGKAPKSLIYD |
| | | | ITPTVDLTNYAQKFQGRITITADTS | | ASSLQSGVPSKFSGSGSGTDFTLTI |
| | | | TNTAYLELRRLRSEDTAIYYCATPL | | SSLQPEDSATYYCQQYSTYPLTFGG |
| | | | NDYYASGNLGLWGQGTLVTVSS | | GTKVEIK |
| | C1008 | 241 | EVQLVESGGGLIQPGGSLRLSCAAS | 242 | QSALTQPASVSGSPGQSITISCTGT |
| | | | GFTVSSNYMSWVRQAPGKGLEWVSV | | SSDVGSYNLVSWYQQHPGKAPKLMI |
| | | | IYSGGSTYYADSVKGRFTISRDNSK | | YEVSKRPSGVSNRFSGSKSGNTASL |
| | | | NTLYLQMNSLRAEDTAVYYCARVVG | | TISGLQAEDEADYYCCSYAGSSTWV |
| | | | YDFWSGYDGGYFDYWGQGTLVTVSS | | FGGGTKLTVL |
| | C1009 | 243 | EVQLVESGGGLLQPGGSLRLSCAAS | 244 | QSALTQPASVSGSPGQSITISCTGT |
| | | | GFSVSSNYMTWVRQAPGKGLEWVAA | | SSDIGNYNLVSWYQQHPGKAPKLMI |
| | | | IYSGDSTYYVDSVKGRFIISRDNSK | | YDVSKRPSGVSNRFSGSKSGNTASL |
| | | | NTVYLHLSSLRAEDTAVYYCARLVG | | TISGLQAEDETDYYCCSYAGSSTWV |
| | | | YDFRSGSDGGYFDYWGHGTLVTVSS | | FGGGTKLTVL |
| | C1010 | 245 | QVQLVESGGGVVQPGRSLRLSCAAS | 246 | DIQMTQSPSSLSASLGDRVTITCQA |
| | | | GFTFSSYAMHWVRQAPGKGLEWVAV | | SQDISNYLNWYQQKPGKAPKLLIYD |
| | | | ISYDGSNKYYADSVKGRFTISRDNS | | ASNLETGVPSRFSGSGSGTDFTFTI |
| | | | KNTLYLQMNSLRAEDTAVYYCAKKG | | SSLQPEDIATYYCQQYDNLPPITFG |
| | | | QPYCGGDCYFYYFDYWGQGTLVTVS | | QGTRLEIK |
| | | | S | | |
| | C1011 | 247 | QVQLVESGGGVVQPGRSLRLSCAVS | 248 | DIQMTQSPSSLSASVGDRVTITCQA |
| | | | GFTFSHYAMHWVRQAPGKGLEWVAV | | SQDISNHLNWYQQKPGKAPKLLIYD |
| | | | ISYDGADKYYADSVRGRFTIARDNS | | ASNLETGVPSRFSGSGSGTDFTFTI |
| | | | KNTLFLQMSSLRPEDTAVYYCAKKG | | SSLQAEDIATYYCQQYDNLPPITFG |
| | | | QPYCGGDCHFYYLDYWGQGTLVTVS | | QGTRLEIK |
| | | | S | | |
| | C1012 | 249 | [sequence omitted] | 250 | EIVMTQSPATLSVSPGERATLSCRA |
| | | | GGTVNNYAINWVRQAPGQGLEWMGG | | SQSVSSHLAWYQQKPGQAPRLLIYG |
| | | | IVPIFGTPNYAQKFQGRVTITADES | | ASTRATGIPARFSGSGSGTEFTLTI |
| | | | TSTAYMELSSLRSEDTAVYYCAKVS | | SSLQSEDFAVYYCQQYHNWPPALTF |
| | | | LTLPIAAAPRFWFDSWGQGTLVTVS | | GGGTKVEIK |
| | | | S | | |
| | C1013 | 251 | QVQLVQSGVEVKKPGSSVKVSCKAS | 252 | EIVMTQSPATLSVSPGERATLSCRA |
| | | | GGTFTDYAFSWVRQAPGQGLEWMGG | | SQGVSTHLAWYQQKPGQAPRLLIYG |
| | | | IVPIFATPDYAEKFRGRVTITADES | | ASTRATGIPARFSGSGSGTEFTLTI |
| | | | TSTAYMELSTLKSEDTAVYYCARAS | | SSLQSEDFAVYYCQQYHKWPPALTF |
| | | | LTLPIRAAPRFWFDAWGQGTLVTVS | | GGGTKVEIK |
| | | | S | | |
| | C1014 | 253 | [sequence omitted] | 254 | EIVMTQSPATLSVSPGERATLSCRA |
| | | | GGSIGSGAYWSWIRQHPAKGLEWIG | | SQSISSNLAWYQQKPGQPPRLLIYG |
| | | | YVYYSGSTFYNPSLETRVSISVDIS | | ASTRATGIPARFSGSGSGTEFTLTI |
| | | | KDQFSLELTSVTVADTAVYYCAREK | | SSLQSEDIAVYYCQHYNNWPPWTFG |
| | | | IEVVSIEMRPHYYGIDVWGQGTTVT | | QGTKVDIK |
| | | | VSS | | |
| | C1015 | 255 | QVQLQESGPRLVKPSGSLSLTCAVS | 256 | DIQLTQSPSFLSASVGDRVTITCRA |
| | | | GGSLSSSNWWNWVRQSPEKGLEWIG | | SQGISSYLAWYQQKPGKAPKLLIYA |
| | | | EIFHSGSTYYNPSLKSRVTISVDKS | | ASTLQSGVPSRFSGSGSGTEFTLTI |
| | | | KNHFSLNLRSVTAADTAVYYCAGSY | | SSLQPEDFATYYCQQLNSYPLTFGG |
| | | | SNYIGGVWFDPWGQGTLVTVSS | | GTKVEIK |
| | C1016 | 257 | QVQLQESGPGLVKPSGTLSLTCAVS | 258 | QSALTQPASVSGSPGQSITISCTGT |
| | | | GGPISSNHWWSWVRQPPGKGLEWIG | | SSDVGANNYVSWYQQHPGKAPKLMI |
| | | | EVYRNGNTNYHPSLKSRVTMSIDNS | | YDVINRPSGVSDRFSGSKSGNTASL |
| | | | KNQFSLSLTSVTAADTAVYYCARGG | | TISGLQAEDEADYYCSSFSTSSTLL |
| | | | DLAMGPEYLDFWGQGTLVTVSS | | FGGGTKLTVL |
| | C1018 | 259 | QVQLVESGGGVVQPGRSLRLLCAAS | 260 | QSVLTQPPSVSGAPGQRVTISCAGS |
| | | | GFTFNTHGMHWVRQAPGKGLEWVAV | | SSNIGAGYGVHWSQQLPGRPPKLLI |
| | | | IWFDGSNKYYADSVKGRFTISRDNS | | YGDSNRPSGVPDRFSGSNSGTSASL |
| | | | TNTLYLQMNSLRAEDTAVYYCARVY | | AITGLQAEDEAVYYCQSYDRSLRAW |
| | | | GGLPYYYAIDVWGQGTTVTVSS | | VFGGGTKLSVL |
| | C1019 | 261 | QVQLVESGGGVVQPGTPLRLSCAAS | 262 | NFMLTQPHSVSESPGKTVTISCTGS |
| | | | GFTFSSYAMHWVRQAPGKGLEWVAM | | SGSIANNYVQWYQQRPGSAPTPVIY |
| | | | ISYDGGNKYYADSVKGRFTISRDNS | | EDDQRPSGVPDRFSGSIDSSSNSAS |
| | | | KNTLFLQMNSLRGEDTAVYYCARSF | | LSISGLKTEDEADYYCQSYDSTNFW |
| | | | SIRIGHKDNWGQGTLVTVSS | | VFGGGTKLTVL |
| | C1020 | 263 | QVQLVQSGAEVKKPGASVKISCKAS | 264 | DIQMTQSPSSLSASVGDRVTITCRA |
| | | | GYSFSNYYIHWVRQAPGQGLEWMGI | | SQSITTSLNWYQQKPGKAPKLLIYS |
| | | | INPSGNSISYAQKFQGRVTMTGDTS | | ASTLESGVPSRFSGSGSGTDFTLTI |
| | | | TSTVYMELSSLRSEDTAVYYCARSV | | SSLQPEDFATYYCQQTYRAPPYTFG |
| | | | FPVPAAGGCDYWGQGTLVTVSS | | QGTKLEIK |
| | C1021 | 265 | QVQLVQSGAELKKPGASVKVSCKAS | 266 | EIVLTQSPATLSLSPGERATLSCRA |
| | | | GYTFSTYYIHWVRQAPGQGLEWMGI | | SQSISSYLAWYQQKPGQAPRLLIYD |
| | | | INPEAGSTSYAQKFQGRVTMTTDTS | | ASNRATDISARFSGSGSGTDFTLTI |
| | | | TSTVYMELISLRSQDTAIYYCARDA | | SSLEPEDFAVYYCQHRSNWPPSFTF |
| | | | VGVPAINSLEYWGQGTLVTVSS | | GGGTKVEIK |
| | C1022 | 267 | QVQLVQSGAEVKTPGASVKVSCQAS | 268 | QSALTQPASVSGSPGQSITISCTGT |
| | | | GDTFTSQYLHWVRQAPGQGLEWMGI | | SSDVGGYNYVSWYQQHPGKAPKLMI |
| | | | INPTAGSTTYAQKFQGRVTMTRDTS | | YDVSNRPSGVSTRFSGSKSGNTASL |
| | | | TSTVYMELRSLRSEDMAVYYCARGG | | TISGLQAEDEADYYCSSPTSSNTHV |
| | | | FIPMVRGFIDHWGQGTLVTVSS | | FGTGTKVTVL |
| | C1023 | 269 | QVQLVQSGAEMKKPGASVKISCKAS | 270 | EIVLTQSPGTLSLSPGERATLSCRA |
| | | | GDTFTTNYFHWVRQAPGQGLEWMGI | | SQSVSHRYLAWYQQKPGQAPRLLID |
| | | | INPSAGSTTYAQRFQGRVTMTGDSS | | GASNRATGIPDRFSGSGSGTDFTLT |
| | | | TNTVYLELRSLRSEDTAMYFCAKGS | | ISRLEPEDFGVYYCQQYGSSPPFTF |
| | | | YIPAMRSSFDPWGQGTLVTVSS | | GQGTKLEIK |
| | C1024 | 271 | QVQLVESGGGVVQPGRSLRLSCAAS | 272 | NFMLTQPHSVSESPGKTVTISCTGS |
| | | | GFTFSDYAMHWVRQAPGKGLEWVAM | | SGSIASNYVHWYQQRPGSAPTTVIF |
| | | | ISYDGNSQYYADSVKGRFTISRDNS | | EDNQRPSGVPDRFSGSIDSSSNSAS |
| | | | KNTLYLQMNILRPEDTAVYYCARTF | | LTISGLKTEDEADYYCQSYDSSSFW |
| | | | SIRIGHHDYWGQGTLVTVSS | | VFGGGTKLTVL |
| COV107 | C903 | 273 | EVQLVESGGGLIQPGGSLRLSCAAS | 274 | EIVLTQSPGTLSLSPGERATLSCRA |
| | | | GFIVSRNYMSWVRQAPGKGLEWVSI | | SQSVSSSYLAWYQQKPGQAPRLLIF |
| | | | IYSGGSTFYADSVKGRFTISRDNSK | | DVSSRATGIPDRFSGSGSGTDFTLT |
| | | | NTVYLQMNSLRAEDTAVYYCARDYG | | ISRLEPEDFAVYYCQQYGSSPRTFG |
| | | | DFYFDYWGQGTLVTVSS | | QGTKVEIK |
| | C904 | 275 | QVQLQQWGAGLLKPSETLSLTCAVN | 276 | EIVLTQSPGTLSLSPGERATLSCRA |
| | | | GGSLSLYYWSWIRQSPGKGLEWIGE | | SQSVAGSYLAWYQQKPGQAPRLLIY |
| | | | INHFGGSDYKPSLKSRVSISVDTST | | GASSRATGVPDRISGSGSGTDFTLT |
| | | | NQFSLKLSSVTAADTAVYYCARKPL | | ISRLEPEDFAVYYCQQYTNTPRTFG |
| | | | LHSNISPGAFDIWGQGTMVTVSS | | GGTKVEI |
| | C905 | 277 | QVQLQESGPGLVTPSQTLSLTCSVS | 278 | NFMLTQPHSVSESPGKTVTISCTGS |
| | | | GGSIHSRDFYWGWIRQHPGKGLEWI | | GGSIASNYVQWYQQRPGSAPTTVIY |
| | | | GHIYYTGNTYYNPSLKSRVTISADT | | EDNERPSGVPDRFSGSIDSSSNSAS |
| | | | SKNQFSLKLSSVTAADTAVYYCARA | | LTISGVKTEDEADYFCQSYDVGNPV |
| | | | TVVITLHWFDPWGQGTLVTVSS | | IFGGGTKLTVL |
| | C906 | 279 | EVQLVESGGGLIKPGRSLRLSCTAS | 280 | DIVMTQSPLSLSVTPGEPASISCRS |
| | | | GFTFGDYAMTWFRQAPGKGLEWVGF | | SQSLLHSNGINYFDWYLQKPGQSPQ |
| | | | IRSKAYGGTTGYAASVKYRFTISRD | | LLIYLGSNRASGVPDRFSGSGSGTD |
| | | | DSKSIVYLQMDSLKTEDTAVYYCTR | | FTLKISRVEAEDVGVYYCMQVLQIP |
| | | | WDGWSQHDYWGQGTLVTVSS | | YTFGQGTKLEI |
| | C907 | 281 | QVQLQESGPGLVKPSETLSLTCTVS | 282 | DIQMTQSPSSLSAFVGDRVTITCRA |
| | | | GGSITSYYWTWIRQSPGKGLEWIGY | | GQSISSYLHWYQQKPGKAPKLLIYA |
| | | | IYYIGSTNYNPSLKSRLTISLATSK | | TSTLQSGVPSRFSGRGSGTDFTLTI |
| | | | NQFSLRLNSVTAADTAVYYCASYYN | | SGLQPEDFATYYCQQSYSTPQTFGQ |
| | | | DTSGYSYGLDVWGQGTTVTVSS | | GTKVEIK |
| | C908 | 283 | EVQLVQSGAEVKKPGESLKISCKAS | 284 | QSVLTQPPSASGTPGQRVTISCSGS |
| | | | GYSFTIYWIGWVRQMPGKGLEWMGI | | SSNIGDNTVNWYQQLPGTAPKLLIY |
| | | | IYPGESETRYSPSFQGQVTISADKS | | NNIQRPSGVPDRFSGSKSGTSASLA |
| | | | ISTAYLQWRSLKASDTAMYYCARGG | | ISGLQSEDEADYYCASWDDSLNGPV |
| | | | PPGGVKLELTDYWGQGTLVTVSS | | VFGGGTKLTVL |
| | C909 | 285 | QVQLVQSGAEVKKPGASVKVSCRAS | 286 | QSALTQPASVSGSPGQSITISCTGT |
| | | | GYTFPNYDLNWVRQATGQGLEWMGW | | SSDVGGYNLVSWYQQYPGNVPKLMI |
| | | | MNPNSGNTGYAQKFQGRITMTRITS | | YEDAKRPSGVSNRFSGSKSANTASL |
| | | | ISTAYMELSSLRSEDTAVYYCARGR | | TISGLQAEDEADYYCCSYAGSSTRY |
| | | | ANWNSNFLLDSWGQGTLVTVSS | | VFGTGTKVTVL |
| | C910 | 287 | QVQLVQSGAAVKKPGASVKVSCKAS | 288 | QSALTQPASVSGSPGQSITISCTGT |
| | | | GYTFTSYDINWVRQAPGQGLEWMGW | | SSDVGSYNLVSWYQQHPGTAPKLMI |
| | | | MNPNSGNTGFAQRFQGRATLSRDTS | | YEGSKRPSGVSDRFSGYKSGNTASL |
| | | | ITTAYMELTTLRSEDTAVYYCARGR | | TISGLQADDEADYYCCSFAGSTTRY |
| | | | ANYNSKFLLDNWGQGTLVTVSS | | VFGTGTRVTVL |
| | C911 | 289 | QVQLVESGGGVVQPGGSLRLSCAAS | 290 | DIQMTQSPSSLSASVGDRVTITCRA |
| | | | AFTFSSYAMHWIRQSPGKGLEWVAV | | SQSINSYLNWYQQKPGKAPKLLIYA |
| | | | ISSDGSSKFYADSVKGRFTISRDNS | | ASSLHSGVPSRFSGSGSGTDFTLTI |
| | | | KNTLYLQMNSLSAEDTAVYYCARDL | | SSLQPEDFATYYCQQSYTTLALTFG |
| | | | ENVLIEVALQDWGQGTLVTVSS | | GGTKVEIK |
| | C912 | 291 | QVQLVESGGGVVQPGRSLRLSCAAS | 292 | DIQMTQSPSSLSASVGDRVTITCRA |
| | | | GFSFSTYTMHWVRQTPDKGLEWVAV | | SQSISSYLNWYQQKPGKAPKLLIYA |
| | | | ISDDGKNKYYADSMKGRFTISRDNS | | ASSLQSGVPSRFSGSGSGTDFTLTI |
| | | | KNTLYLQMSSLRPEDTAVYYCARDL | | SSLQPEDFATYYCQQSYTTLALTFG |
| | | | ENVMIEVALESWGQGTLVTVSS | | GGTKVEIK |
| | C913 | 293 | EVQLVESGGVVVQPGGSLRLSCAAS | 294 | DIVMTQSPDSLAVSLGERATINCKS |
| | | | GFTFDDYSMHWVRQVPGKGLEWIAV | | SQSVFYISNNKNYLAWYQQKPGQPP |
| | | | IFWDGTSTYYADSVKGRFTISRDNS | | KLLIYWASTRESGVPDRFSGGGSGT |
| | | | KKSLYLQMNSLRSEDTALYYCAKDS | | DFTLTISSLQAEDVAVYYCQQYYNT |
| | | | EDCSSTSCYVDHWGQGTLVTVSS | | PYTFGQGTKLEIK |
| | C914 | 295 | QVQLQESGPGLVKPSQTLSLTCTVS | 296 | QSALTQPPSASGSPGQSVTISCTGT |
| | | | GGSITSGDYYWTWIRQPPGKGLEWI | | STDVGGYNFVSWYQQHPGKAPKLMI |
| | | | GYIYYSGNTYYNLSLRSRITISEDT | | YEVSKRPSGVPDRFSGSKSGNTASL |
| | | | SKNQFSLKLRSVTAADTAVYYCARA | | TVSGLQAEDEADYYCSSYAGSNILY |
| | | | MITFGGVIVVLDYWGQGTLVTVSS | | VFGTGTKVTVL |
| | C915 | 297 | QVQLQESGPGLVKPSQTLSLTCTVS | 298 | QSALTQPPSASGSPGQSVTISCTGT |
| | | | GGSISSGDYYWSWIRQPPGKGLEWI | | SSDVGGYNYVSWYQQHPGKAPKLMI |
| | | | GYIYYSDSTYYNPSLRTRVTISVDT | | YEVTKRPSGVPARFSGSKSGNTASL |
| | | | SKNQFSLKLTSVTAADTAVYYCARA | | TVSGLQAEDEADYYCSSYAGSILLY |
| | | | MITFGGVIVLYDYWGQGTLVTVSS | | VFGTGTKVTVL |
| | C916 | 299 | [sequence omitted] | 300 | DIQMTQSPSSLSASVGDRVTITCRA |
| | | | GFTFSNYDMHWVRQATGRGLEWVST | | SQSISRYLNWYQQKPGKAPKLLIYA |
| | | | IGTAGDTYYPGSVKGRFTISRENAK | | ASSLQSGVPSRFSGSGSGTDFTLTI |
| | | | NSLYLQMNSLRAGDTALYYCARVRY | | SGLQPEDFATYYCQQSYSTPQYTFG |
| | | | DSSGYFWSLDYWGQGTLVTVSS | | QGTKLEIK |
| | C917 | 301 | [sequence omitted] | 302 | DIQMTQSPSSLSASVGDRVTITCRA |
| | | | GFTFSNYDMHWVRQATGKGLDWVST | | SQSISSYLNWYQQKPGKAPKLLIYA |
| | | | IGTAGDTYYPGSVKGRFTISRENAK | | ASSLQSGVPSRFSGSGSGTDFTLTI |
| | | | NSLYLQMNSLRAGDTAVYYCARVRF | | SSLQPEDFATYYCQQSYSNPQYTFG |
| | | | DTSGYFWSLDYWGQGTLVTVSS | | QGTKLEIK |
| | C918 | 303 | QVQLVESGGGLVKPGGSLRLSCTAS | 304 | DIQMTQSPSTLSASVGDRVTITCRA |
| | | | GFTFSDYYMTWLRQAPGKGLEWVSY | | SQSISSWLAWYQQKPGKAPKLLIYQ |
| | | | ISSTSPYTSYADSVKGRFTISRDNA | | ASSLESGVPSRFSGSGSGTDFTLTI |
| | | | RNSVYLQMNSLRAEDTAIYYCARVP | | SSLQPDDFATYYCQQYFRYSWTFGQ |
| | | | PPQRLHPFDVWGQGTMVTVSS | | GTKVEI |
| | C919 | 305 | QVQLVESGGGLVKPGGSLRLSCTAS | 306 | DIQMTQSPSTLSASVGDRVTITCRA |
| | | | GFTFSDYYMTWLRQAPGKGLEWVSY | | SQSISSWLAWYQQKPGKAPKLLIFK |
| | | | ISSTSPYTSYADSVKGRFTISRDNA | | ASSLESGVPSRFSGSGSGTDFTLTI |
| | | | RNSVYLQMNSLRAEDTAVYYCARVP | | SSLQPDDFATYYCQQYFRYSWTFGQ |
| | | | PPQRLHPFDVWGQGTMVTVSS | | GTKVEI |
| | C920 | 307 | QLQLQESGPGLVKPSETLSLTCAVS | 308 | EIVLTQSPATLSLSPGERATLSCRA |
| | | | GGSISNSPFYWGWIRQPPGKGLECI | | SQSVSSYLAWYQQKPGQAPSLLIYD |
| | | | GSIYYSGSTYYNPSLKSRVTISVDT | | VSNRATGIPARFSGSGSGTDFTLTI |
| | | | SKKQFSLKLSSVTAADTAVYYCARH | | SSLEPEDFAVYYCQQRINWPLYTFG |
| | | | FADGSGRVVDSWGQGILVTVSS | | QGTKLEIK |
| | C921 | 309 | QLQLQESGPGLVKPSETLSLTCAVS | 310 | EIVLTQSPATLSLSPGERATLSCRA |
| | | | GGSISNSPFYWAWIRQPPGKGLECI | | SQSVTTYLAWYQQKPGQAPRLLIYD |
| | | | GSIYYTGSTYYNPSLKSRVTISVDT | | VSSRATGIPARFSGSGSGTDFTLTI |
| | | | STKQFSLKLRSVTAADTAVYYCARH | | SSLEPEDFAVYYCQQRSNWPLYTFG |
| | | | FADGSGRVVDYWGQGTLVTVSS | | QGTKLEIK |
| | C922 | 311 | QVQLVESGGGLVKPGGSLRLSCAGS | 312 | DIQMTQSPSSLSASVGDRVTITCQA |
| | | | GFTFTDYYMAWIRQAPGKGLEWVSY | | SQDISNLLNWYQQKAGKAPKLLIYD |
| | | | ISTSDRFINYADSVKGRFTISRDDA | | ASNLETGVPSRFSGSGSGTDFTFTI |
| | | | KNSLYLQMNSLRAEDTAVYYCARDG | | SSLQPEDIATYYCLQYDNLPLTFGQ |
| | | | GGYDRFDHWGQGTLVTVSS | | GTKLEIK |
| | C923 | 313 | QVQLVESGGGLVKPGGSLRLSCAAS | 314 | DIQMTQSPSSLSASVGDRVTITCQA |
| | | | GFTFSDYHMTWIRQAPGKGLEWVSY | | SQDIKKFLNWYQQKPGKAPKLLIYD |
| | | | ISNRSTYRNYADSVKGRFTISRDNA | | ASNLETGVPSRFSGSGSGTDLTFTI |
| | | | KNSLYLQMNSLRAEDTAVYYCARDG | | SSLQPEDIATYYCQQYDNLPLTFGQ |
| | | | GAYDRFDYWGQGTLVTVSS | | GTKLEIK |
| | C924 | 315 | QVQLVESGGGVVQPGRSLRLSCAAS | 316 | EIVMTQSPATLSVSPGERATLSCRA |
| | | | GFTFSSYGMHWVRQAPGKGLEWVAV | | SQSVSSNLAWYQQKPGQAPRLLIYG |
| | | | ISDDGSNKYYADSVKGRFTISRDNS | | ASTRATGIPARFSGTGSGTEFTLTI |
| | | | KNTLYLQMNSLRAEDTAVYYCAKSW | | SSLQSEDFAVYYCQQYNNWPLTFGG |
| | | | WLSENWFDPWGQGTLVTVSS | | GTKVEIK |
| | C925 | 317 | QVQLVESGGGVVQPGRSLRLSCAAS | 318 | EIVMTQSPATLSVSPGERATLSCRA |
| | | | GFTFSNYGLHWVRQAPGKGLEWVAV | | SQSVRSNLAWYQQRPGQAPRLLIYG |
| | | | TSDDGNRKYYADSVKGRFTISRDDS | | AFTRATGIPARFSVSGSGTEFTLTI |
| | | | KNTLYLQMNNLRTEDTAVYYCAKSW | | DSLQSEDFAVYYCQQYNNWPLTFGG |
| | | | WLSENWFDPWGQGTLVTVSS | | GTKVEIK |
| | C926 | 319 | QVQLVESGGGVVQPGRSLRLSCAAS | 320 | DIVMTQSPDSLAVSLGERATINCKS |
| | | | GFGLITYSMHWVRQAPGKGLEWVGL | | SQSLLPSSNSNNYLAWYQQKSGQPP |
| | | | ISFDGNTTYYADSVRGRFTISRDNL | | NLLIYWASTRESGVPDRFSGSGSET |
| | | | ANILYLQMNSLRPDDTALYYCARDK | | DFSLTISNLQAEDVAVYYCQQYYNT |
| | | | RGVIRGLLNFWGQGSLVTVSS | | PHTFGGGTKVEI |
| | C927 | 321 | QVQLVESGGGVVQPGRSLRLSCVAS | 322 | SYELTQPPSVSVAPGKTARITCGGN |
| | | | GFTFSYFDMHWVRQAPGKGLEWVAL | | NIGSKSVHWYQQRPGQAPVLVIYYD |
| | | | ISHDGSTTFYGDSARGRFTISRDNS | | SDRPSGIPERFSGSNSGNTATLTIS |
| | | | RNTLDLQMNSLRPEDTAVYFCAKPV | | RVEAGDEADFYCQVWDRSTNHLVVF |
| | | | DAAMFDFWGQGTLVTVS | | GGGTQLTVL |
| | C928 | 323 | QVQLVESGGGVVQPGRSLRLSCAAS | 324 | SYELTQPPSVSVAPGETARITCGGN |
| | | | GFTFSFFDMHWVRQAPGKGLEWVAD | | NIGHKSVHWYQQQPGQAPVLVIYYD |
| | | | ISYDGSNQYYGDSVKGRFTISRDNS | | SERPSGIPERFSGSNSGNTATLTIS |
| | | | KSTLYLQMNSLRAEDTAVYYCAKPV | | RVEAGDEADYHCQVWDGGNDHLVIF |
| | | | DTAMFDSWGQGTLVTVSS | | GGGTKLTVL |
| | C929 | 325 | EVQLVESGGGLIQPGGSLRLSCAAS | 326 | DIQLTQSPSFLSASVGDRVTITCRA |
| | | | GFTVSSNYMTWVRQAPGKGLEWVSV | | SQGISSYLAWYQQKPGKAPKLLIYA |
| | | | IYSGGTTYYADSVKGRFTISRDNSK | | ASTLQSGVPSRFSGSGSGTEFTLTI |
| | | | NTLYLQMNSLRAEDTAVYYCARDLV | | SSLQPEDFATYYCQLLNSYPYTFGQ |
| | | | VWGMDVWGQGTTVTVSS | | GTKLEIK |
| | C930 | 327 | EVQLVESGGGLFQPGGSLRLACAAS | 328 | DIQLTQSPSFLSASVGDRVTITCRA |
| | | | GITVSSNYMSWVRQPPGKGLEWVSV | | SQGISSYLAWYQQKPGKAPKLLIYA |
| | | | IYAGGSTFYADSVKGRLTISRDNSK | | ASTLQSGVPSRFSGSGSGTEFTLTI |
| | | | NTLYLQINSLRAEDTAVYYCARDLV | | SSLQPEDFATYYCQQLNTYPYTFGQ |
| | | | VWGMDVWGQGTTVTVSS | | GTKLEIK |
| | C931 | 329 | QVQLVESGGGVVQPGRSLRLSCAAS | 330 | SYELTQPPSVSVSPGQTASITCSGD |
| | | | GFSFSTYGMHWVRQAPGKGLEWVAV | | KLGDKSACWYQQKPGQSPVLVIYQD |
| | | | ISFDGSQKYYGDSVKGRFTISRDNP | | NKRPSGIPERFSGSNSGNTATLTIS |
| | | | KNTLDLQMNSLRAEDTAVYYCAKVV | | GTQAMDEADYYCQAWDSSTAVFGGG |
| | | | VRGVIISLYYGMDVWGQGTTVTVSS | | TKLTVL |
| | C932 | 331 | QVQLVESGGSVVQPGKSLRLSCAGS | 332 | SYELTQPPSVSVTPGQTASITCSGD |
| | | | GFAFSTYGMHWVRQAPGKGLEWVAV | | KLGDKYACWFLQKPGQSPLLVIYQD |
| | | | ISSDGGNKYYADSVKGRFTISRDNY | | TKRPSGIPDRLSGSKSGNTATLTIS |
| | | | ENTLYLQMNSLGAEDTAVYYCAKVA | | GTQAMDEADYYCQTWDSSAVVFGGG |
| | | | LRGVFISLYYGMDVWGQGTTVTVSS | | TKLTV |
| | C933 | 333 | [sequence omitted] | 334 | QSVLTQPPSASGTPGQRVTISCSGS |
| | | | GYTFTDYYIHWVRQAPGQGLEWMGW | | SSNIGSNTVNWYQQLPGTAPKLLIY |
| | | | INPNSGGTNYAQKFQGRVTMTRDTS | | SNNQRPSGVPDRFSVSKSGTSASLA |
| | | | ISTAYMELSRLRSDDTAVYYCARDV | | ISGLQSEDEADYYCAAWDDSLNGVV |
| | | | IVSMVRGVIFRMDVWGQGTTVTVSS | | FGGGTKLTVL |
| | C934 | 335 | [sequence omitted] | 336 | QSVLTQPPSASGTPGQRVTISCSGS |
| | | | GYTFTDYYIHWVRQAPGQGLEWMGW | | SSNIGNNTVNWYQQFPGTAPKLLIH |
| | | | INPNSGGTNYAQKFQGRVTMTRDTS | | SNNQRPSGVPDRFSGSKSGTSASLA |
| | | | ISTAYMDLSRLRSDDTAVYYCARDV | | ISGLQSEDEADYYCAAWDDSLNGVV |
| | | | IITMGRGVVFRMDVWGQGTTVTVSS | | FGGGTKLTVL |
| | C935 | 337 | QVQLVESGGGVVQPGRSLRLSCAAT | 338 | DIQLTQSPSFLSASVGDRVTIACRA |
| | | | GFTFSSYGMHWVRQAPGKGLEWVAL | | SQGISSYSSYLAWYQQKPGKAPKLL |
| | | | IWYDGSNQYYVDSVKGRFTISRDNS | | IYAASTLQSGVPSRFSGSGSGTEFT |
| | | | KKTLYLQMNSLRVEDTAVYYCARDF | | LTISSLQPEDFATYYCQQLNSYPLF |
| | | | SNSDMVTLSDAFDIWGQGTMVTVSS | | TFGPGTKVDIK |
| | C936 | 339 | EVQLVESGGGLIQPGGSLRLSCAAS | 340 | DIQLTQSPSFLSASVGDRVTITCRA |
| | | | GFTVSSNYMSWVRQAPGKGLEWVSV | | SQGISSYLAWYQQKPGKAPKLLIYA |
| | | | IYSGGSTFYADSVKGRFTISRDNSK | | ASTLQSGVPSRFSGSGSGTEFTLTI |
| | | | NTLYLQMNSLRAEDTAVYYCARDLG | | SSLQPEDFATYYCQQLDSYPPGTFG |
| | | | TGLFDYWGQGTLVTVSS | | PGTKVDIK |
| | C937 | 341 | EVQLVESGGGLIQPGGSLRLSCAAS | 342 | DIQLTQSPSFLSASVGDRVTITCRA |
| | | | ELTVSSNYMSWVRQAPGKGLEWVSV | | SQGISSYLAWYQQKPGKAPKLLIYA |
| | | | IYPGGSTFYADSVKGRFTISRDNSK | | ASTLQSGVPSRFSGSGSGTEFTLTI |
| | | | NTLYLQMNSLRAEDTAVYYCARDLG | | SSLQPEDFATYFCQLLNSNPPGTFG |
| | | | TGLFDYWGQGTLVTVSS | | PGTKVDIK |
| | C938 | 343 | QVQLVESGGGVVQPGRSLRLSCAAS | 344 | DIQMTQSPSSLSASVGDRVTITCRA |
| | | | GFTFRSHAMHWVRQAPGKGLEWVAI | | SQNISNFLNWYQQKPGKAPKLLIYA |
| | | | ISSDGFNKYYADSVKGRFTISRDNS | | ASSLQSGVPSRYSGSGSGTDFTLTI |
| | | | KNTLYVHMNSLRVEDTAIYYCASGL | | SSLQAEDFATYYCQQSYSTPLTFGG |
| | | | LWFETREISGAPDYGMAVWGQGATV | | GTKVEIK |
| | | | TVSS | | |
| | C939 | 345 | QVQLVESGGGVVQPGRSLRLSCAAS | 346 | DIQMTQSPSSLSASVGDRVTITCRA |
| | | | GFTFSSYAMHWVRQAPGKGLESVAL | | SQSISTYLNWYQQKPGRAPKFLIYA |
| | | | ISHDGSNKYHADSVKGRLTISRDTS | | ASSLQSGVPSRFSGSGSGTDFTLII |
| | | | KNTLYLQMDSLRPEDTAVYYCASGL | | SGLQPEDFATYFCQQSYNTPLTFGG |
| | | | LWFETAGGSGAPDYGMAVWGQGTTV | | GTKVEIK |
| | | | TVSS | | |
| | C940 | 347 | QVQLQESGSGLVKPSQTLSLTCAVS | 348 | QSALTQPASVSGSPGQSITISCTAT |
| | | | GGSASSGGYSWSWIRQPPGKGLEWI | | SSDVGGYNFVSWYQQYPGKVPKLLI |
| | | | GYIYHSGSTYYNPSLKSRVTISLDR | | YDVGNRPSGVSNRFSGSKSGNTASL |
| | | | TKKQFSLKLSSVTAADTAVYYCARF | | TISGLQAEDEADYYCSSYTNSSTFF |
| | | | CLSGSHYLFAFDIWGPGTMVTVSS | | GGGTKLTVL |
| | C941 | 349 | [sequence omitted] | 350 | QSVLTQPPSVSGAPGQRVTISCTGS |
| | | | GGTSRSYPISWVRQAPGQGLEWMGR | | SSNIGAGYDVHWYQQLPGAAPKLLI |
| | | | IIPIVGTANYAQRFQGRVTITADES | | YRNINRPSGVPDRFSGSKSGTSASL |
| | | | TGTAYMELSSLRSEDTAVYYCARNR | | AITGLQADDEADYYCQSYDSSLSGS |
| | | | GYSDYGSVYYFDYWGQGTLVTVSS | | VFGGGTKLTV |
| | C942 | 351 | QVQLVESGGGVVQPGRSLRLSCAAS | 352 | DIQMTQSPSSLSASVGDRVSITCRA |
| | | | GFTFSSYVMHWVRQAPGKGLEWVAI | | SQRISSYLNWYQQKPGKAPKLLIYA |
| | | | ISSDGNTKYYADSVKGRFTISRDNS | | ASSLQSGVPSRFSGSGSGTDFTLTI |
| | | | KNTLYLQMNSVRTDDTAVYYCARDG | | SSLQPEDFATYYCQQSYSTPPLTFG |
| | | | TTMTPTDLLTDWGQGTLVTVSS | | PGTKVDIK |
| | C943 | 353 | QVQLVESGGGVVQPGRSLRLSCAAS | 354 | SYELTQAPSVSLAPGKTARITCGEN |
| | | | GFPFSSFGMHWVRQAPGRGLEWVAL | | NIGSKSVHWYQQKPGQAPVLVIYYD |
| | | | ILYDGDNKYYADSVKGRFTISRDNS | | SDRPSGIPERFSGSNSGNTATLTIS |
| | | | KNTLYLQMNSLRAEDTAVYYCAKDI | | RVEAGDEADYYCQVWDSSSDHVMFG |
| | | | GGGSSPPFFDYWGQGTLVTVSS | | GGTKLTVL |
| | C944 | 355 | QVQLVESGGGVVQPGRSLRLSCAAS | 356 | DIQMTQSPSSLSASVGDRVTITCRA |
| | | | GFTFSSYGMHWVRQAPGKGLEWVAV | | SQSISSYLNWYQQKPGKAPKLLIYA |
| | | | ISYDGSYKYYADSVKGRFTISRDNS | | ASSLQSGVPSRFSGSGSGTDFTLTI |
| | | | KNTLYLQMNSLRAEDTAVYYCAKGS | | SSLQPEDFATYYCQQSYSTPHSSFG |
| | | | GSQLYYYYGMDVWGQGTTVTVSS | | PGTKVDIK |
| | C945 | 357 | QVQLVQSGAEVKKPGASVRISCKAS | 358 | EIVLTQSPATLSLSPGERATLSCRA |
| | | | GYTFTNYYMHWVRQAPGQGLEWMGI | | SQSVSSYLAWYQQKPGQAPRLLIYD |
| | | | INPSGGSTTYAPKFQARVTMTRDTS | | ASNRATGIPARFSGSGSGTDFTLTI |
| | | | TSTVYMELSSLRSDDTAVYYCARDY | | SSLEPEDFAIYYCQQRSNWPYTFGQ |
| | | | VLVPARSGMDVWGQGTTVTVS | | GTKLEIK |
| | C946 | 359 | [sequence omitted] | 360 | EIVLTQSPATLSLSPGERATLSCRA |
| | | | GYTFTNYYIHWVRQAPGQGLEWMGI | | SQSVSSYLAWYQQKPGQAPRLLIYD |
| | | | INPDGDSTSYVQKFQGRVTMTRDTS | | ASNRATGIPARFSGSGSGTDFTLTI |
| | | | TSTVYMELSSLRSEDTAVYYCARDL | | SSLEPEDFAVYYCQQRSNWLFTFGP |
| | | | VFVPATSAMDVWGKGTTVTVSS | | GTKVDIK |
| | C947 | 361 | QVQLQESGPGLVRPSGTLSLTCAVT | 362 | QSVLTQPPSVSGAPGQRVTISCTGS |
| | | | GGSISSSDCWSWVRQPPGKGLEWIG | | SSNIGAGYDVHWYKQLPGTAPKLLI |
| | | | EICHGRTSNYNPSLKSPVSISVDKS | | YGNTNRPSGVPGRFSGSKSGTSASL |
| | | | KNQFSLILSSVTAADKAVYYCARSS | | AITGLQAEDEADYFCQSYDTRLSVV |
| | | | RFLPPLPDAFDLWGQGTMVTVSS | | FGGGTKLT |
| | C948 | 363 | [sequence omitted] | 364 | DIQMTQSPSSLSASIGDRVTITCRA |
| | | | GFTFSRYDMHWVRQATGKGLEWVSI | | SQNINSYLNWYQQKPGKAPKLLIYA |
| | | | IGTAGDTYYPGSVKGRFTISRDNAK | | ASSLQSGVPSRFSGSGSGTDFTLTI |
| | | | NSLFLQMNSLRAGDTAVYYCARANY | | NSLQPEDFATYYCQQSYSMPSWTFG |
| | | | DSSGYHNWFDPWGQGTLVTVSS | | QGTKVEI |
| | C949 | 365 | QVQLQESGPGLVKPLQTLSLTCTVS | 366 | QSALTQPRSVSGSPGQSVPISCTGT |
| | | | GGSISNGDYYWSWIRQSPGKGLEWI | | SSDVGGYDYVSWYQQHPGKAPKLII |
| | | | GNIFYSGATYFNPSLKSRVTLSVDT | | YDVSERPSGVPDRFSGSKSGNTASL |
| | | | SKNQFSLKLSSVTAADTAVYYCARV | | TISGLQAEDEATYYCCSYAGTSVMF |
| | | | VRVLPAASVDCWGQGTLVTVSS | | GGGTKLTVL |
| | C951 | 367 | QVQLQESGPRLVKPSGTLSLTCAVS | 368 | QSALTQPASVSGSPGQSITISCTGT |
| | | | GGSISTTNWWSWVRQPPGKGLEWIG | | SSDVGGYNYVSWYQQHPGKAPNLMI |
| | | | EIHHSGNTNYNPSLKSRVTISVDRS | | YDVSDRPSGVSNRFSGSKSGNTASL |
| | | | KNQFSLKLSSVTAADTAVYFCARDG | | TISGLQAEDEADYYCNSFTSNSTRV |
| | | | GRPGDPFDIWGQGTMVTVSS | | FGTGTKVTV |
| COV96 | C1025 | 369 | [sequence omitted] | 370 | DIQMTQSPSSVSASVGDRVTITCRA |
| | | | GFTFDDYAMHWVRQVPGKGLEWVSG | | SQGISSWLAWYQQKPGKAPKLLISL |
| | | | VSWNGDSVGYADSMEGRFTISRDNA | | ASSLQSGVPSRFSGSGSETDFTLII |
| | | | KNSLYLQMNSLRTEDTALYYCAKGV | | SSLQPEDFATYYCQQSSSFPLTFGG |
| | | | DYSSSSNFDFWGQGTLVTVSS | | GTKVEIK |
| | C1026 | 371 | QVQLVESGGGVVQPGKSLRLSCAAS | 372 | DIQMTQSPSSLSASLGDRVTITCRA |
| | | | GFIFSSYSMHWVRQAPGKGLEWVAV | | SQSISNYLNWYQQKPGKAPKLLIYG |
| | | | VSNDGSGKFYADSVRGRFTIFRDNS | | ASSLQSGVPSRFSGSGSGTDFTLTI |
| | | | KNTLYLQVSSLRAEDTAVYYCARDA | | SNLQPEDFATYFCQQSYSTPSVTFG |
| | | | LTSISVLFDCWGQGTLVTVSS | | GGTKVEIK |
| | C1027 | 373 | [sequence omitted] | 374 | DIQMTQSPSSLSASVGDRVTITCQA |
| | | | GFIVTTNYMSWVRQAPGKGLEWVSL | | SQDINIYLNWYQQRPGKAPKLLIYD |
| | | | IYPGGSTFYADSVEGRFTISRDNSK | | ASNLQTGVPSRFSGSGSGTDFTITI |
| | | | NTLYLQVNSLRVEDTAVYYCARDTF | | SSLQPEDIATYYCQQYDNLPRSFGQ |
| | | | GRGDDHWGQGTLVTVSS | | GTKLEI |
| | C1028 | 375 | QVQLVESGGGVVQPGRSLRLSCADS | 376 | DIQMTQSPSSLSASVEDRVTITCRA |
| | | | GFTFSSSGMHWVRQAPGKGLEWVGV | | SQSISSYLNWYQQKPGKAPKLLIYA |
| | | | ISYDGGNKYYADSVKGRFTISRDNS | | AISLQSGVPSRFSGSGSGTEFTLTI |
| | | | KNTLYLQMNSLRAEDTAVYYCAKDT | | SSLQPEDFATYYCQQSYTTPWAFGQ |
| | | | PGGDDIMTGWGLYGMDVWGQGTTVT | | GTKVEIK |
| | | | VSS | | |
| | C1029 | 377 | QVQLVESGGGVVQPGRSLRLSCAAS | 378 | DIQMTQSPPSLSAAVGDRVTITCRA |
| | | | GFTFSSFGMHWVRQAPGKGLEWVAV | | SQSISSYLNWYQQKPGKAPKLLIYA |
| | | | ISYDGSYKDYGDSVKGRFTISRDNS | | ASSLQSGVPSRFSGSGSGTDFTLTI |
| | | | KNTLYLQMNSLRAEDTAVYYCARDS | | SSLQPEDFATYYCQQSYSTPPWTFG |
| | | | NVDTVMVTWFDYWGRGTLVTVSS | | QGTKVEIK |
| | C1030 | 379 | EVQLVESGGGLVQPGGSLRLSCEAS | 380 | DIQLTQSPSFLSASVGDRVTITCRA |
| | | | GVIVSSNYMNWVRQAPGKGPEWVSV | | SQGINSDLAWYQQKPGKAPKLLIYG |
| | | | LYAGGSTFYADSVKGRFTISRDDSK | | ASTLQSGVPSRFSGSGSGTEFSLTV |
| | | | NTLFLQMNNLRAEDTAVYFCARDLI | | SSLQPEDFATYYCQQLNSYRRFGGG |
| | | | AFGMDVWGQGTTVTVSS | | TKVEIK |
| | C1031 | 381 | QLQLQESGPGLVKPSETLSLTCTVS | 382 | QSALTQPPSASGSPGQSVTISCTGT |
| | | | GGSINTSTYYWGWIRQPPGKGLEWI | | SSDVGSYNYVSWYQQHPGKAPKLMI |
| | | | GNIYYSGITYYNPSLKSRVTISVDT | | YEVTKRPSGVPDRFSGSKSGNTASL |
| | | | SKNQFSLKLRSVTAADTAVYYCARQ | | TVSGLQADDEADYYCSSYAGSSNLV |
| | | | HRFGSGSSELLWGQGTLVTVSS | | FGGGTKLTV |
| | C1032 | 383 | EVQLVESGGSLVKPGGSLRLSCVAS | 384 | DIQMTQSPSSLSASVGDRVTITCRA |
| | | | GLTFNHAWMSWVRQAPGKGLEWVGR | | SQAIATFLNWYQQKPGKAPKLLIYA |
| | | | IKSKIDGGTTDYAAPVKGRFTISRD | | ASSLQSGVPSRFSGSGSGTDFTLTI |
| | | | DSKSTQYLQMNSLKTEDTAVYYCTT | | SSLQPEDFATYYCQQSYNSLHFGGG |
| | | | DCFWRLGGTTCYEHDAFDVWGQGTM | | TKVEIK |
| | | | VTVS | | |
| | C1033 | 385 | [sequence omitted] | 386 | EIVLTQSPGTLSLSPGERATLSCRA |
| | | | GGTFSRNVISWVRQAPGQGLEWMGG | | SQSVSSNYLAWYQQKPGQAPRLLIY |
| | | | IIPMFGTANYAQKFQGRVTISADES | | DASSRATGIPDRFSGSGSGTDFTLT |
| | | | TSTAYMELSSLRSEDTAVYYCARED | | IRRLEPEDFAVYYCQQYGGSPRTFG |
| | | | FILESAPIRENSYYYYGMDVWGQGT | | QGTKVEIK |
| | | | TVTVSS | | |
| | C1034 | 387 | QLQLQESGPGLVKPSETLSLTCTVS | 388 | DIQMTQSPSSLSASVGDRVTITCRA |
| | | | GGSVSSNNHYWGWIRQPPGKGLEWI | | SQTINNYLNWYQQKPGKPPKLLIYA |
| | | | GSISSSGSTHHNPSLRSRVTISVDT | | AFSLHSGVPSRFSGSRSGTDFTLTI |
| | | | SKNHFSLKLNSVTATDTAVYYCARV | | SSLQPEDFATYYCQHSYSTMCSFGQ |
| | | | DSSGWYTGDVFDVWGQGTMVTVSS | | GTKLEIK |
| | C1035 | 389 | EVQLVESGGGLIQPGGSLRLSCAAS | 390 | EIVLTQSPGTLSLSPGERATLSCRA |
| | | | GLTVSRNYMNWVRQAPGKGLEWVSV | | SQSFSSTYLAWYQQKPGQAPRLLIY |
| | | | MYSGGSTFYADSVKGRFTISRDNSK | | GASSRATGIPDRFSGSGSGTDFTLT |
| | | | NTLYLQMNSLRAEDTAVYYCARESY | | ISRLEPEDFAVYYCQQYVTSPWTFG |
| | | | GMDVWGQGTTVTVSS | | QGTKVEIK |
| | C1036 | 391 | EVQLVESGGGLIQPGGSLRLSCAAS | 392 | EIVLTQSPGTLSLSPGERATLSCRA |
| | | | GLIVSRNYMNWVRQVPGKGLEWVSV | | SQSISSTYLAWYQQKPGQAPRLLIY |
| | | | MYAGGSTFYADSVKGRFTISRDDSK | | GASSRATGIPDRFSGSGSGTDFTLT |
| | | | NTLYLQMNSLRPEDTAVYYCARESY | | ISRLEPEDFAVYYCQQYVTSPWTFG |
| | | | GMDVWGQGTTVTVSS | | QGTKVEIK |
| | C1038 | 393 | [sequence omitted] | 394 | SYELTQPPSVSVAPGKTARITCGGN |
| | | | GYTFTSYYMHWVRQAPGQGLEWMGI | | NIGSKSVHWYQQKPGQAPVLVVYDD |
| | | | INPSGGSTRYAQKFQGRVTMTRDTS | | SDRPSGIPERFSGSNSGNTATLTIS |
| | | | TSTVYMELSSLRSEDTAVYYCAREG | | RVEAGDEADYYCQVWDSSSDPYVFG |
| | | | VGGTSYFDYWGQGTLVTVSS | | TGTKVTVL |
| | C1039 | 395 | [sequence omitted] | 396 | SYELTQPPSVSVAPGKTAGITCGGS |
| | | | GYTFTSHYMHWVRQAPGQGLEWMGI | | DIGSKSVHWYQQKPGQAPVLVVYDD |
| | | | INPRTRYAQMFQGRVSMNRDTSTST | | SDRPSGIPERFSGSNSGNTATLTIS |
| | | | VYMELSSLTSEDTAVYYCAREGLGA | | RVEAGDEADYYCQVWDSSSDPYVFG |
| | | | TAYFDYWGQGTLVTVSS | | TGTKVSVL |
| | C1040 | 397 | QVQLVESGGGVVQPGRSLRLSCAAS | 398 | DVVMTQSPLSLPVTLGQAASISCRS |
| | | | GFSFINYNMHWVRQAPGKGLEWVAV | | SQSLVHSDGNTYLNWFQQRPGQSPR |
| | | | IWYDGSNKYYADSVKGRFTISRDNS | | RLIYRVSNRDSGVPDRFSASGSGTD |
| | | | KNTLYLQMNSLRVEDTAVYYCARDP | | FTLKISRVEAEDVGVYYCMQGTHWP |
| | | | AITEAEIDYWGQGTLVTVSS | | WTFGQGTKVEIK |
| | C1041 | 399 | [sequence omitted] | 400 | EIVLTQSPATLSLSPGERATLSCRA |
| | | | GYTFSDHYIYWVRQAPGQGLEWMGI | | SQSVSRYLAWYQQKPGQAPRLLIYD |
| | | | INPSAGSTSYAQKFQGRVTMTRDTS | | ASNRATGIPARFSGSGSGTDFTLTI |
| | | | TSTVYMELSSLRSEDTAVYYCARDI | | SSLEPEDFAVYYCQQRSNWLFTFGP |
| | | | VFVPATMAMDVWGLGTTVTVSS | | GTKVDIK |
| | C1042 | 401 | [sequence omitted] | 402 | EIVLTQSPATLSLSPGERATLSCRA |
| | | | GYTFSDHYIYWVRQAPGQGLEWMGI | | SQSVSRYLAWYQQKPGQAPRLLIYD |
| | | | INPSGGSTSYAQKFQGRVTMTRDTS | | ASNRATGIPARFSGSGSGTDFTLTI |
| | | | TSTVYMELSSLKSEDTAVYYCSRDI | | SSLEPEDFAVYYCQQRSNWLFTFGP |
| | | | VFVPATMAMDVWGQGTTVTVSS | | GTKVDIK |
| | C1043 | 403 | [sequence omitted] | 404 | QSALTQPASVSGSPGQSITISCTGT |
| | | | GFIFDNYAMHWVRQAPGKGLEWVSG | | SSDIGGNNYVSWYQQHPGKAPRLMI |
| | | | ISWNSDSIGYADSVKGRFTISRDNA | | FDVSYRPSGVSNRFSGSKSGNTASL |
| | | | KNSLYLQMSSLRAEDTALYYCAKDL | | TISGLQAEDEADYYCISYTTSSTLG |
| | | | LGNYYYYTLDVWGQGTTVTVSS | | VFGGGTKLTVL |
| | C1044 | 405 | QVQLQESGPGLVKPSQTLSLTCTVS | 406 | SYELTQPPSVSVAPGKTARITCGGN |
| | | | GGSISSGNYYLTWIRQPAGKGLEWI | | NIGSKNVHWYQQKPGQAPVLVVYDD |
| | | | GHIYTSGSTNYNPSLKSRVTISVDT | | SDRPSGIPERFSGSNSGNTATLTIS |
| | | | SMNQFSLKLSSVTAADTAVYYCARD | | RVEAGDEAGYYCQVWDSTSDHLFWV |
| | | | IPPTWYFDLWGRGTLVTVSS | | FGGGTKLTVL |
| | C1045 | 407 | QVQLQESGPGLVKPSQTLSLTCTVS | 408 | SYELTQPPSVSVAPGKTARIPCGGT |
| | | | GDSISSGNYYWSWIRQPAGKGLEWI | | DIGSKNVHWYQQKPGQAPVLAVYDD |
| | | | GHIYTSGSPNYKPSLKSRVTISLDT | | SDRPSGIPERFSGSNSGSTATLTIS |
| | | | SKNQFSLKLTSVTAADTAMYYCARD | | RVEAGDEADYYCQVWDSSGDRLSWV |
| | | | IPSTWYFDLWGRGTLVTVSS | | FGGGTKLTVL |
| | C1046 | 409 | EVQLVQSGAEVKKPGESLKISCKGS | 410 | DIQLTQSPSSLSASVGDRVTITCRA |
| | | | GYSFTSYWIGWVRQMPGKGLEWMGI | | SQGISSALAWYQQKPGKAPKLLIYD |
| | | | IYPGDSDTRYSPSFQGQVTISADKS | | ASSLESGVPSRFSGSGSGTDFTLTI |
| | | | ISTAYLQWSSLKASDTAMYYCARMV | | SSLQPEDFATYYCQQFNNFGPGTKV |
| | | | TSGTYYYDNSGYSSSGPFDYWGQGT | | DIK |
| | | | LVTVSS | | |
| | C1047 | 411 | EVQLVQSGAEVKKPGESLKISCKGS | 412 | DIQLTQSPSSLSASVGDRVTITCRA |
| | | | GYSFISYWIVWVRQMPGKGLEWIGI | | SQGISSALAWYQQKPGKAPKLLIYD |
| | | | IYPGDSDTIYSPSFQGQVTLSADKS | | ASSLESGVPSRFSGSGSGTDFTLTI |
| | | | ISTAYLQWSSLKASDTAIYYCAKMV | | SSLQPEDFATYYCQQSDNFGPGTKV |
| | | | TSGTSYYETRGYASSGPFDNWGQGT | | DI |
| | | | LVTVSS | | |
| | C1048 | 413 | EVQLVQSGAEVKKPGESLKISCKVS | 414 | QSVLTQPPSASGTPGQRVTISCSGS |
| | | | GYSFISHWIGWVRQMPGKGLEWMGI | | SSNIGSNPVSWYQQLPGPAPQLLIY |
| | | | IYPGDSDTRYSPSFQGQVTISADKS | | GNDQRPSGVPDRFSGSKSGTSASLA |
| | | | ISTAYLQWSSLKASDTAMYYCARRG | | ISGLQSEDEADYYCAAWDDSLNGYV |
| | | | ASWELDYWGQGTLVTV | | FGTGTKVTVL |
| | C1049 | 415 | EVQLVQSGAEVKKPGESLKISCKSS | 416 | QSVLTQPPSASGTPGQRVTISCSGS |
| | | | GYSFISHWIGWVRQMPGKGLEWMGI | | SSNIGSNTVNWYLQLPGTAPKLLIY |
| | | | IWPGDSDTRYSPSFQGQVTISVDKS | | GNDQRPSGVPDRFSGSKSGTSASLA |
| | | | ITTVYLQWSSLKAADTAMYYCARRG | | ISGLQSEDEADYYCAAWDDRLNGYV |
| | | | SSWEVDYWGQGTLVTVSS | | FGTGTTVTVL |
| | C1050 | 417 | [sequence omitted] | 418 | QSALTQPASVSGSPGQSITISCTGT |
| | | | GFTFDDYGMHWVRQAPGKGLEWVSG | | SSDVGGYNLVSWYQQHPGKAPKLMI |
| | | | ISWNGDSIGYADSVKGRFTISRDNA | | YEGSKRPSGVSNRFSGSKSGNTASL |
| | | | KTSLYLQMNRLRAEDTALYYCAKAA | | TISGLQAEDEADYYCCSYAYSFTNV |
| | | | SRSTRIGGAFDIWGQGTMVTVSS | | FGTGTKVTV |
| | C1051 | 419 | EVQLVESGGGLVQPGRSLRLSCVAS | 420 | QSALTQPASVSGSPGQSITISCTGT |
| | | | GFTFDDYGLHWVRQAPGKGLEWVSG | | SSDVGGYNLVSWYQQYPGKAPKLMI |
| | | | ISWNSDSIGYADSVKGRFAISRDNA | | YEDSKRPSGVSHRFSGSKSGNTASL |
| | | | RTSLYLQMNRLRAEDTALYYCAKAA | | TISGLQAEDEADYYCCSYAFSFTNV |
| | | | SRSTRIGGAFDIWGQGTMVTVSS | | FGTGTKVTV |
| | C1052 | 421 | QVQLVQSGAEVKKPGASVKVSCKVS | 422 | DIQMTQSPSTLSASVGDRVIITCRA |
| | | | GYTLSELSMHWVRQAPGEGLEWLGG | | SQNIHNWLAWYQQKPGKAPKLLIYK |
| | | | FDPEDGETINAQKFQGRVTMTEDRS | | ASSLESGVPSRFSGSGSGTEFTLTI |
| | | | TDTAYMELSSLRSEDTAVYYCATRG | | SSLQPDDFATYFCQQYHSYSWTFGQ |
| | | | RYCSSGNCYYHHWGQGTLVTVSS | | GTKVEIK |
| | C1053 | 423 | EVQLLESGGGLVQPGGSLRLSCAAS | 424 | DIQMTQSPSSLSASVGDRVTITCRA |
| | | | GFTFSSYAMNWVRQAPGKGLEWVSA | | SQSISRYLNWYQQKPGKAPKLLIYG |
| | | | ISGSGGGTYYADSVKGRFTISRDNS | | ASSLQSGVPSRFSGSGSGTDFTLTI |
| | | | KNTLYLQMDSLRAEDTAVYYCAKDV | | SSLQPEDFATYWCQQSYSTLSITFG |
| | | | PIEQQLVPTFDYWGQGALVTVSS | | QGTRLEIK |
| | C1054 | 425 | EVQLLESGGGLVQPGGSLRLSCVVS | 426 | DIQMTQSPSSLSASVGDRVTITCRA |
| | | | GFTFSSYAMNWVRQAPGKGLEWVSV | | SQSISRYLNWYQQKPGKAPKLLIYA |
| | | | IGGSGDGRYYADSVKGRFTISRDNS | | ASSLQSGVPSRFSGSGSGTEFTLTI |
| | | | KNTLYLQMNSLRGDDTAVYYCARDV | | SSLQPEDFATYYCQQSYSTLSITFG |
| | | | PVEQQLVPTFDYWGQGTLVTVSS | | QGTRLEIK |
| | C1055 | 427 | QVQLVESGGGVVQPGRSLRLSCAAS | 428 | DIQMTQSPSTLSASVGDRVTITCRA |
| | | | GFTFSTYGMNWVRQAPGKGLEWVAL | | SQSISSWLAWYQQKPGKAPKLLIYK |
| | | | ILYDGSDKYYADSVKSRFTISRDNS | | ASSIESGVPPRFSGSGSGTEFTLTI |
| | | | RNTLYLQMTSLRAEDTAVYYCAKAL | | SSLQPDDFATYYCQQYNSYSYTFGQ |
| | | | SSTYYYDASGPDAFDIWGQGTMVTV | | GTKLEIK |
| | | | SS | | |
| | C1056 | 429 | QVQLVESGGGVVQPGRSLRLSCAAS | 430 | DIQMTQSPSTLSASVGDRVTITCRA |
| | | | GFTFSTYGMNWVRQAPGKGLEWVAL | | SQSISTWLAWYQQKPGKAPQLLIYK |
| | | | ILFDGSDKYYADSVKSRFTISRDNS | | ASSIESGVPPRFSGSGSGTEFTLTI |
| | | | RNTLYLQMTSLRAEDTAVYYCAKAL | | SSLQPDDFATYYCQQYNSYSYTFGQ |
| | | | SSTFYFDASGPDAFDIWGQGTMVTV | | GTKLEIK |
| | | | SS | | |
| | C1057 | 431 | [sequence omitted] | 432 | QSALTQPRSVSGSPGQSVTITCTGT |
| | | | GGTFTTYIISWVRQAPGQGLEWMGG | | SSNVGGYKYVSWFQQHPGKAPKFLI |
| | | | ISPMLGTANYAQKFQGGVTITADES | | YDVSERSSGVPDRFSGSKSGNTASL |
| | | | TTTAYMEMSGLRSEDTAVYYCARAH | | TISGLQAEDEADYYCCSYAGKYTVV |
| | | | MYCSDGSCYRQSGYFDSWGQGTLVT | | FGGGTRLTV |
| | | | VSS | | |
| | C1058 | 433 | [sequence omitted] | 434 | DIQLTQSPSFLSASVGDRVTITCRA |
| | | | GIIVSSNYMNWVRQVPGKGLEWVSV | | SQGISSYLAWYQQKPGKAPNLLIYA |
| | | | LYSGGSTFYADSVRGRFTISRDNSK | | ASTLQSGVPSRFSGSGSGTDFTLTI |
| | | | NTLFLQMNSLRPEDTAVYYCARDFR | | SSLQPEDFATYYCQQLNSYSPLFGQ |
| | | | EGAFDIWGQGTMVTV | | GTRLEIK |
| | C1059 | 435 | [sequence omitted] | 436 | DIQLTQSPSFLSASVEDRVTITCRA |
| | | | GVTVSYNYMHWVRQAPGKGLEWVSV | | SQGISSYLAWYQQKPGKAPKLLIYG |
| | | | FFPGGSIFYADSVKGRFSISRDNSH | | ASTLQSGVPSRFSGSGSGTEFTLTI |
| | | | NTLYLQMNNLRPEDTAVYYCARDFR | | SSLQPEDSATYYCQQLNSYPPLFGQ |
| | | | EGAIDLWGQGTMVTVSS | | GTRLEIK |
| | C1060 | 437 | EVQLVESGGDLVQPGGSLRLSCAAS | 438 | DIQMTQSPSSVSASVGDRVTITCRT |
| | | | EIIVSRNYMNWVRQAPGKGLEWVSI | | SQSISTSLAWYQQKPGKAPKLLIYA |
| | | | IYSGGSTFYGDSVKGRFTISRDSSK | | ASSLQRGVPSRFSGTGSGTDFTLTI |
| | | | NTLYLQMHGLRVEDTAIYYCARSYG | | SSLQPEDFATYYCQQSSSSPPLFTF |
| | | | DYYIDYWGQGTLVTVSS | | GPGTKVDIK |
| | C1061 | 439 | [sequence omitted] | 440 | DIQMTQSPSSLSASVGDRVTITCRA |
| | | | GFTFSRYDMHWVRQGTGKGLEWVSA | | SQSISRYLNWYQQKPGKAPKLLIYA |
| | | | IGTSGDTYYPDSVKGRFTISRENAK | | ASSLQSGVPSRFSGSGAGTDFTLTI |
| | | | NSLYLQMNSLRAGDTAVYYCARGGL | | SSLQPEDFAIYYCQQSYSNPPITFG |
| | | | QTTTWLFDYWGQGTLVTVSS | | QGTRLEIK |
| | C1062 | 441 | [sequence omitted] | 442 | DIQMTQSPSSLSASVGDRVTITCRA |
| | | | GFTFSNYDMHWVRQTTGKGLEWVSA | | SQTISRYLNWYQQKPGKAPKLLIYA |
| | | | IGTAGDTYYPGSVKGRFTMSRENAK | | ASSLQSGVPSRFSGSGSGTDFTLTI |
| | | | NSLYLQMNSLRAGDTAVYYCARGGL | | SSLQPEDFATYYCQQSYTMPPITFG |
| | | | QTTTWLFDNWGQGTLVTVSS | | QGTRLEIK |
| | C1063 | 443 | EVQLVQSGAEVKKPGESLKISCKGY | 444 | NFMLTQPHSVSESPGKTVTISCTRS |
| | | | GNSFNNYWIAWVRQMPVKGLEWMGV | | SDSIGSNYVQWYQQRPGSSPTIVIY |
| | | | INPGDSDTRYSPSFQGQVTISVDKS | | EDSQRPSGVPHRFSGSFDSSSNSAS |
| | | | ISTAYLQWSSLKASDTAMYYCARTW | | LTISGLKTEDEADYYCQSWDSGNLV |
| | | | SPAAVAFFDSWGQGTLVTVS | | FGGGTKLTVL |
| | C1065 | 445 | EVQLVESGGGLIQPGGSLRLSCAAS | 446 | QSALTQPASVSGSPGQSITISCTGT |
| | | | GFTVSRNYMSWVRQAPGKGLEWVSV | | SSDIGGYHYVSWYQQHPGKAPKLMI |
| | | | IYSGGSTFYADSVKGRFTISRDNSK | | YDVSNRPSGISNRFSGSKSGNTASL |
| | | | NTLYLQMNSLRAEDTAVYYCARGLP | | TISGLQAEDEADYYCSSYASSSVIF |
| | | | TGEGWNYFDYWGQGTLVTVSS | | GGGTKLTVL |
| | C1066 | 447 | [sequence omitted] | 448 | QLVLTQSSSASASLGSSVKLTCTLN |
| | | | GFMFDDYAMHWVRQAPGKGLEWVSG | | SGHSSYIIAWHQQQPGKAPRYLMKL |
| | | | INWSSADIGYVDSVKGRFTISRDNA | | EGSGSYNKGSGVPDRFSGSSSGADR |
| | | | KNSLYLQMNSLRTEDTAFYYCAKGW | | YLTISNLQFEDEADYYCATWDSNTQ |
| | | | FGELLGGSDSWGQGTLVTVSS | | VFGGGTKLTVL |
| | C1067 | 449 | [sequence omitted] | 450 | EIVLTQSPGTLSLSPGERATLSCRA |
| | | | RDTFTTHYIHWVRQAPGQGLEWMGI | | SQSVSSSYLAWYQQKPGQAPRLLIY |
| | | | INPSGGSISYAQKFQGRVTMTRDTS | | GASSRATGIPDRFTGSGSGTDFTLT |
| | | | TSTVYMELSSLRSEDTAVYYCARGG | | ISRLEPEDFAVYYCQQYGRSSGFTF |
| | | | IVPHLSNWFDPWGQGTLVTVSS | | GPGTKVDIK |
| | C1068 | 451 | QVQLVESGGGVVQPGRSLRLSCAAS | 452 | DIVMTQSPDSLAVSLGERATINCKS |
| | | | GFTFSTFAMHWVRQAPGKGLEWVAV | | SQSVLFSSTNKNYLAWYQQKPGQPP |
| | | | TSYDGSNKYYADSVKGRFTISRDNS | | KLLIYWAATRESGVPDRFSGSGSGT |
| | | | KNTLYLQMNSLRAEDTAVYYCARGL | | DFTLTISSLQAEDVAVYHCQQYYST |
| | | | LWFGESEYFQHWGQGTLVTVSS | | PFTFGPGTKVDIK |
| | C1069 | 453 | QVQLVESGGGVVQPGRSLRLSCAAS | 454 | DIQMTQSPSSLSASVGDRVTITCRA |
| | | | GFTFSSYSIHWVRQAPGKGLEWVAV | | SQSISRYLNWYQQKPGKAPKLLIYD |
| | | | ISDDASMKFYADSVKGRFTISRDNS | | ASSFQSGVPSRFSGSGSGTDFTLTI |
| | | | KNTLFLQMNSLSPEDTAVYYCARDA | | SSLQPEDFATYYCQQSYSTPSVTFG |
| | | | LTAISVRFDYWGQGTLVTVSS | | GGTKVEIK |
| coV21 | C837 | 455 | CAGGTGCAGCTGGTGGAGTCTGGGG | 456 | CAGTCTGTGCTGACTCAGCCACCGT |
| | | | GAGGCTTGGTCAAGCCTGGGGGGTC | | CAGCGTCTGGGACCCCCGGACAGAG |
| | | | CCTGACTCTCTCCTGTGCAGGCGCT | | GGTCACCATCCCTTGTTCTGGAGGC |
| | | | GGATTCAATTTCAGTGACTATTGCC | | AGCTCCAACATCGGCAGTAACACCG |
| | | | TGACCTGGATCCGTCAGGCTCCAGG | | TACACTGGTATCAGCAGGTCCCAGG |
| | | | GAAGGGGCTGGAGTGCCTTTCATAC | | AACGGCCCCCAAACTCCTCGTCTAT |
| | | | ATTTGTAGTGGTGCTGATGAAACAT | | GGTAATAATCGGCGGCCCGCAGGGG |
| | | | ATATCGCTGACTCTGTGAAGGGCCG | | TCCCTGACCGATTCTCTGGCTCCAG |
| | | | ATTCACCATCTCCAGGGACAACGCC | | GTCTGGCGCCTCAGCCTCCCTGGCC |
| | | | AAGAATTCACTGTATTTGAAAATGA | | ATCACTGGGCTCCAGTCTGAGGATG |
| | | | GCAGCCTGAGAGCCGAAGACACGGC | | AGGCTGTGTACTACTGTGCAACATG |
| | | | CGTCTATTACTGTGCGAGAAGGGGG | | GGATGACAGCCCGAATGGTCCGGTT |
| | | | GACGGTAACACCCCGATCTACCACT | | TTCGGCGGAGGGACCAAGCTGACCG |
| | | | ACTACTACATGGACGTCTGGGGCAA | | TCCTAG |
| | | | AGGGACCACGGTCACCGTCTCCTCA | | |
| | C838 | 457 | GAAGTGCAGCTGGTGGAGTCTGGGG | 458 | GAAATTGTGTTGACACAGTCTCCAG |
| | | | GAGGCTTGGTACAGCCTGGCAAGTC | | CCACCCTGTCTTTGTCTCCAGGGGA |
| | | | CCTGAGACTCTCCTGTACAGCCTCT | | AAGAGCCACCCTCTCCTGCAGGGCC |
| | | | GGATTCACCTTTGAAGATTATGCCA | | AGTCAGAGTGTTGGCACCTACTTAG |
| | | | TGCACTGGGTCCGGCAAGCTCCAGG | | CCTGGTACCAACACAAACTTGGCCA |
| | | | GAAGGGCCTGGAGTGGGTCTCAGGT | | GGCTCCCAGGCTCCTCATCTATGAT |
| | | | ATTAATTGGAAGAGTGGTAGTAGAG | | GCAACCAAGAGGGCCACTGGCATCC |
| | | | GCTACGCAGACTCTGCGAAGGGCCG | | CAGCCAGGTTCAGTGGCAGTGGGTC |
| | | | CTTCACCATCTCCGGAAACACCGCC | | TGGGACAGACTTCACTCTCACCATC |
| | | | AAGAACACCCTCCATCTGCAAATGA | | AGCAGCCTAGAGCCTGAAGATTTTG |
| | | | ACAGTCTGCGAGCGGAGGACACGGC | | CTATTTATTACTGTCAGCAGCGTAT |
| | | | CTTCTATTACTGTGCAAAAGCGGGC | | CACCTTCGGCCAAGGGACACGACTG |
| | | | GTTAGGAATATAGCAGCGGCTGGTC | | GAGATTAAAC |
| | | | CCGACCTCAACTTTGACTTCTGGGG | | |
| | | | CCAGGGAACCCTGGTCACCGTCTCC | | |
| | | | TCAG | | |
| | C839 | 459 | CAGGTGCAGCTGCAGGAGTCGGGCC | 460 | GACATCCAGATGACCCAGTCTCCAT |
| | | | CAGGACTGGTGAAGCCTTTAGATAC | | CCTCCCTGTCTGCATCTATAAGAGA |
| | | | CCTGTCCCTCACATGCACTGTCTCT | | CAGAGTCACCATCACTTGCCAGGCG |
| | | | GGTGCCTCCATCAGCAGTTACTATT | | AGTCAGGACATAAGTAATTATTTAA |
| | | | GGAGCTGGATCCGGCAGCCCGCCGG | | ATTGGTATCAGCAGAAAGCAGGGGA |
| | | | GAAGGGACTGGAGTGGATTGGACTT | | AGCCCCTAAACTTCTGATCTACGAT |
| | | | ATCTATAGTAGTGGAAGCACTACTT | | GCATCCAGTTTGGAAACAGGGGTCC |
| | | | ACAACCCCTCCCTCAAGAGTCGAGT | | CATCAAGGTTCAGTGGAAGTGGATC |
| | | | CACCATGTCAGTTGACACGTCCAAG | | TGGGACAGAATTTACTCTCACCATC |
| | | | AAGCAGTTCTCCCTGAACCTCAGTT | | AGCAGCCTGCAGCCTGAAGACATTG |
| | | | CGATGACCGCCGCGGACACGGCCGT | | CCACATATTACTGTCAACAGTATGA |
| | | | GTATTACTGTGCGAGAGGGTCGGCC | | TCATGTCCCGCTCACTTTCGGCGGA |
| | | | TTAAACTGGAAGTCCATTGGATACT | | GGGACCAAGGTGGAGATCAAAC |
| | | | TTGACTCCTGGGGCCAGGGAACCCT | | |
| | | | GGTCACCGTCTC | | |
| | C840 | 461 | CAGGTGCAGCTGGTGGAGTCTGGGG | 462 | GACATCCAGATGACCCAGTCTCCAT |
| | | | GAGGCGTGGTCCAGCCTGGGAGGTC | | CCTCCCTGTCTGCATCTGTAGGAGA |
| | | | CCTGAGACTCTCCTGTGAAGCCTCT | | CAGAGTCACCATCACTTGCCGGGCA |
| | | | GGATTCACCTTCACTGCCTATGCTA | | AGTCAGAGCGTTAACAACTATTTAA |
| | | | TGCACTGGCTCCGCCAGGCTCCAGG | | ATTGGTATCAGCAGAAACCAGGGCA |
| | | | CAAGGGGCTGGAGTGGGTGGCAGTT | | AGCCCCTAAGCTCCTGATCTATGCT |
| | | | ATCTTAAATGATGGAAGCAATAAAT | | GCATCCAGTTTGCAAAGTGGGGTCC |
| | | | TGTACGCAGACTCCGTGAAGGGCCG | | CATTAAGGTTCAGTGGCAGTGGATC |
| | | | ATTCACCGTCTCCCGAGATAATTCC | | TGGGACAGATTTCGCTCTCACCATC |
| | | | AAGAACATGCTGTATCTGCAAGTGA | | ACCAGTCTCCATACTGAGGATTTTG |
| | | | ACAGCCTGAGAGTTGACGACACGGC | | CCACTTACTACTGTCAACAGAGTTA |
| | | | TGTGTATTATTGTGCGAGAGACGGG | | CAATACCCCGCCGTGGACGTTCGGC |
| | | | AGCGTGGATACACTTATGGTTACGT | | CCAGGGACCAAGGTGGAAATCAAAC |
| | | | GGTTTGATTATTGGGGCCAGGGAAC | | |
| | | | CCTGGTCACCGTCTCCTCAG | | |
| | C841 | 463 | GAGGTGCAGCTGGTGGAGTCTGGGG | 464 | TCCTATGAGCTGACTCAGCCACCCT |
| | | | GAGGCTTGGTACAGCCGGGGGGGTC | | CCGTGTCAGTGGCCCCAGGAAAGAC |
| | | | CCTGAGGCTCTCCTGTGCTGCCTCT | | GGCCAGGATTCCCTGTGGGGGAGAC |
| | | | GGATTCACCTTCAGTATATTTAGTA | | AGCGTTGGGAGTAAGAGTGTACACT |
| | | | TGAACTGGGTCCGCCAGGCTCCAGG | | GGTATCAACAGAAGTCTGGCCAGGC |
| | | | GAAGGGGCTGGAGTGGATCTCATAC | | CCCTGTCTTAGTCATTCATTCTGAT |
| | | | ATTAGTAGTAGTAGTGGTTCCAGAC | | AGTGACCGGCCCTCAGGGATCCCTG |
| | | | ACTACGCAGACTCTGTGAAGGGCCG | | AGCGATTCTCTGGCTCCAACTCTGG |
| | | | ATTCACCATCTCCAGAGACAATGCC | | GAACACGGCCACCCTGACCATCACC |
| | | | AAGAATTCACTGTATCTGCAAATGA | | GGGGTCGCAGCCGGGGATGAGGCCG |
| | | | ACAACCTGAGAGACGAGGACACGGC | | ACTATTATTGTCATGTGTGGGATAC |
| | | | TATGTATTACTGTGCGAGAGAGGCC | | TATTGGTGATCGTTTTTATTGGGTG |
| | | | CACGACGGGGCTCTCACCGGCTACG | | TTTGGCGGAGGGACCAAGCTGACCG |
| | | | GTGACTACCTGAACTGGTTCGACCC | | TCCTAG |
| | | | CTGGGGCCAGGGAGTCCTGGTCACC | | |
| | | | GTCTCCTCAG | | |
| | C842 | 465 | CAGGTGCAGCTGGTGGAGTCTGGGG | 466 | GACATCCAGATGACCCAGTCTCCAT |
| | | | GAGGCGTGGTCCAGCCTGGGAGGTC | | CCTCCCTGTCTGCATCTGTAGGAGA |
| | | | CCTGAGGCTCTCCTGTGCAGCCTCT | | CAGAGTCACCATCACTTGCCAGGCG |
| | | | GGATTCACCTTCAGTACCTATGCTA | | AGTCAGCACATTAGCAATTACTTAA |
| | | | TCCACTGGGTCCGCCAGGCTCCAGG | | ATTGGTATCAGCAGAAACCTGGGAA |
| | | | CAAGGGGCTGGAGTGGGTGGCAGCT | | AGCCCCTAAGCTCCTGATCTACGAT |
| | | | ATATCATATGATGGAAGCAATAAAT | | GCATCCAATTTGGAAACAGGGGTCC |
| | | | ACTACTCAGACTCCGTGAAGGGCCG | | CATCAAGGTTCAGTGGAACTGGATC |
| | | | ACTCTTCATCTCCAGAGACAATTCC | | TGGGACAGATTTTGCTTTCACCATC |
| | | | AACAACACAGTGTATCTGCAAATGA | | AGCAGCCTGCAGCCTGAAGATATTG |
| | | | ACAATCTGAGAGCTGAGGACACGGC | | CAACATATTACTGTCAACAATATGA |
| | | | TATTTATTACTGTGCGAGAGATGGG | | TAATCTCCCTCCGGTTTTCGGCCCT |
| | | | ACTATTGTTACTTTGGTTCGAGGAG | | GGGACCAAAGTGGATATCAAAC |
| | | | TTATGGGACCACCCTTTGACTACTG | | |
| | | | GGGCCAGGGAACCCTGGTCACCGTC | | |
| | | | TCCTCAG | | |
| | C843 | 467 | CAGGTGCAGCTGGTGGAGTCTGGGG | 468 | GACATCCAGATGACCCAGTCTCCAT |
| | | | GAGGCGTGGTCCAACCTGGGAGGTC | | CCTCCCTGTCTGCATCTGTCGGAGA |
| | | | CCTGAGACTCTCCTGTGCAGCCTCT | | CAGAGTCACCATCACTTGCCAGGCG |
| | | | GGATTCACCTTCAGTCGCTATGCCA | | AGTCAGGACATTAGCAACTATTTAA |
| | | | TGCACTGGGTCCGCCAGGCTCCAGG | | ATTGGTATCAGCAGAAACCAGGGAA |
| | | | CAAGGGGCTGGAGTGGGTGGCAGTT | | AGCCCCTAAACTCCTAATCTACGAC |
| | | | ATATCATATGATGGAAGTAATAAAT | | GCATCCGATTTGGAAACAGGGGTCC |
| | | | ACTATGCAACCTCCCTGAAGGGCCG | | CATCAACGTTCAGTGGAAGTGGATC |
| | | | ATGC | | TGGGACAG |
| | | | ACCATCTCCAGAGACAATTCCAAGA | | ATTTTACTCTCACCATCAGCAGCCT |
| | | | ACACGCTGTATCTGCAAATGAACAG | | GCAGCCTGAAGATTTTGCAACATAT |
| | | | CCTGAGAGCTGAGGACACGGCTGTG | | TACTGTCAACAGTATGATATTGTCC |
| | | | TATTTCTGTGCGAAGCAAATCGGGG | | CATTCACTTTCGGCCCTGGGACCAA |
| | | | AATATTGTAGTGGTGGTAACTGCTA | | AGTGGATATCAAAC |
| | | | CCAGGGGAGTCTTGACTACTGGGGC | | |
| | | | CAGGGAACCCTGGTCACCGTCTCCT | | |
| | | | CAG | | |
| | C844 | 469 | GAGGTGCAGCTGGTGGAGTCTGGGG | 470 | GACATCCAGATGACCCAGTCTCCAT |
| | | | GAGGCTTGGTAAAGCCTGGGGGGTC | | CCTCCCTGTCTGCATCTGTAGGAGA |
| | | | CCTTAGACTCTCCTGTGTAGCCACT | | CAGAGTCACCATCACTTGCCGGGCA |
| | | | GGATTCAGTTTCAGTGACGCCTGGA | | AGTCAGAGTATTGGCCACTATTTAA |
| | | | TGAACTGGGTCCGCCAGGCTCCAGG | | ATTGGTATCAGCAGAAACCAGGGAA |
| | | | GAAGGGGCTGGAGTGGGTTGGCCGT | | AGCCCCTAAACTCCTGATATATGCC |
| | | | ATTAGAAGTGAGATTGCTGATGGGA | | GCATCCAGTTTGCAAAGTGGAGTCC |
| | | | CAACAGACTATGCTGCACCCGTAAA | | CATCAAGGTTCAGTGGCAGTGGATC |
| | | | AGGCAGATTCACGATCTCTAGAGAT | | TGGGGCTGGTTTCACTCTCACCGTC |
| | | | GATGCAAGAAACACACTGTATCTGC | | AACGGTCTGCAACCTGAAGATCTTG |
| | | | AAATGAACAGCCTGGAAATAGAGGA | | CAACTTATTACTGTCAACAGTATTA |
| | | | CACCGCCGTATATTACTGCACCACA | | CACTACCCCTCCGACGTTCGGCCAA |
| | | | GGTGTTGTGGTGGTGGTTTCGTCTA | | GGGACCAAGGTGGAAATCAAAC |
| | | | GTCCCGATGATGCTTTTGATGTCTG | | |
| | | | GGGCCAAGGTACAATGGTCACCGTC | | |
| | | | TCTTCAG | | |
| | C845 | 471 | CAGGTGCAGCTGCAGGAGTCGGGCC | 472 | GAAATTGTGTTGACACAGTCTCCAG |
| | | | CAGGACTGGTGAAGCCTTCACAGAC | | CCACCCTGTCTTTGTCTCCAGGGGA |
| | | | CCTGTCCCTCACCTGCACTGTCTCT | | AAGAGCCACCCTCTCCTGCAGGGCC |
| | | | GGTGCCTCCATCAGCAGTGGTGAAT | | AGTCAGAGTGTTGGCAGCGACTTAG |
| | | | ACTACTGGAGCTGGGTCCGGCAGCC | | CCTGGTACCAACAGAAACCTGGCCA |
| | | | CCCAGGGAAGGGCCTGGAGTGGGTT | | GGCTCCCAGGCTCCTCATCTATGAT |
| | | | GGCTATATCTACTATAGTGGGAGTA | | ACATCCAACAGGGCCACTGGCATCC |
| | | | CCTACTACAACCCGTCCCTCAAGAG | | CAGCCAGGTTCAGTGGCAGTGGATC |
| | | | TCGAGTTACCATATCAGTGGACACG | | TGGGACAGACTTCACTCTCACCATC |
| | | | TCTAAGAACCACTTCTCCCTGAAGC | | AGCAGCCTAGACCCTGCAGATTTTG |
| | | | TGAAATCTCTGACAGCCGCGGACAC | | CAGTTTATTACTGTCAGCAGCGTAC |
| | | | GGCCGTGTATTTCTGTGCGACAGGG | | CAACTGGCTGTTCAGTTTCGGCCCT |
| | | | GGACTCTCCGCGTTCGGGGAATTAT | | GGGACCAAAGTGGATATCAAAC |
| | | | TTCCGCACGACAAGTGGGGCCAGGG | | |
| | | | AACCCTGGTCACCGTCTCCTCAG | | |
| | C846 | 473 | CAGGTGCAGCTGGTGGAGTCTGGGG | 474 | GACATCCAGATGACCCAGTCTCCAT |
| | | | GAGGCGTGTTCCAGCCTGGGAGGTC | | CCTCCCTGTCTGCATCTGTAGGAGA |
| | | | TCTGAGACTCTCCTGTGCAGCCTCT | | CAGAGTCACTATCACTTGCCGGGCA |
| | | | GGATTCAACTTCAGAACATATGCAA | | AGTCAGAGCATTCGCACTTTTTTAA |
| | | | TGCACTGGGTCCGCCAGGCTCCAGG | | GTTGGTATCAGCAGAAAGCAGGGAA |
| | | | CAAGGGGCTGGAGTGGGTGGCAGTT | | AGCCCCTAAACTCCTGATCTATACT |
| | | | ATTTTAGATGATGGAAGTGGTAAGT | | GCATCCAGTTTGCAAAATGGGGTCC |
| | | | TCTACGCAGACTCCGTGAAGGGCCG | | CATCAAGGTTCAGTGGCAGTGGATC |
| | | | ATTCACCGTCTCCAGAGACAATTCC | | TGGGACAGATTTCACTCTCACCATC |
| | | | AAGCACACTCTCTATCTGCAAATGA | | AGCAGTCTGCAACCTGAAGATTTTG |
| | | | CCAGCCTGAGCGCTGAGGACACGGC | | CAACTTACTACTGTCAACAGAGTTA |
| | | | TATATATTTCTGTGCGAGAGATCAG | | CGAAACCCCTCCGTGGACGTTCGGC |
| | | | GGGACGGCGACAACGTACTTCGACC | | CAAGGGACCAAGGTGGAAATCAAAC |
| | | | ACTGGGGCCAGGGAACCCTGGTCAC | | |
| | | | CGTCTCCTCAG | | |
| | C847 | 475 | CAGGTGCAGCTGGTGGAGTCTGGGG | 476 | GACATCCAGATGACCCAGTCTCCAT |
| | | | GAGGCGTGGTCCAGCCTGGGGGGTC | | CCTCCCTGTCTGCATCTGTAGGAGA |
| | | | CCTGAGACTCTCCTGTGGAGCCTCT | | CAGAGTCACTATCACTTGCCGGGCA |
| | | | GGATTCACCTTCAGTAGCTATGCCA | | AGTCAGAGCATTAGCAGCTATTTAA |
| | | | TGCACTGGGTCCGCCAGGCTCCAGG | | ATTGGTATCAGCAGAAACCAGGGAA |
| | | | CGAGGGGCTGGAGTGGGTGGCAGTT | | AGCCCCTAAACTCCTGATCTATACT |
| | | | ATATTATATGATGGAGCCGGTAAAT | | GCATCCAGTTTGCAAAGTGGGGTCC |
| | | | TTTACGCGGACTCCGTGAAGGGCCG | | CATCAAGGTTCAGTGGCAGTGGCTC |
| | | | ATTCACCATATCCAGAGACAATTCC | | TGGGACAGATTTCACTCTCACCATC |
| | | | AAGAACACACTGTATCTGCAAATGA | | ACCAGTCTGCAACCTGAAGATTTTG |
| | | | ACAGCCTGAGAGCTGAGGACACGGC | | CAACTTACTACTGTCAACAGAGTTA |
| | | | TGTGTATTACTGTGCGAGAGACTAC | | CAATACCCCACCGTGGACGTTCGGC |
| | | | GGTGACTACGTTACACACTTTGACT | | CAAGGGACCAAGGTGGAAATCAAAC |
| | | | ACTGGGGCCAGGGAGCCCTGGTCAC | | |
| | | | CGTCTCCTCAG | | |
| | C848 | 477 | CAGGTGCAGCTGCAGGAGTCGGGCC | 478 | CAGTCTGCCCTGACTCAGCCTCCCT |
| | | | CAGGACTGGTGAAGCCTTCACAGAC | | CCGCGTCCGGGTCTCCTGGACAGTC |
| | | | CCTGTCCCTCACCTGCACTGTCTCT | | AGTCACCATCTCGTGCACTGGAACC |
| | | | GGTGGCTCCATCAGCAGTGGTGATT | | AGCAGTGACGTTGGTACTTATGACT |
| | | | ACTACTGGAGTTGGATCCGCCAGCC | | ATGTCTCCTGGTACCAACAGCACCC |
| | | | CCCAGGGAAGGGCCTGGAGTGGATT | | GGGCAAAGCCCCCAAAGTCATAATT |
| | | | GGCTACATCTATTACACTGGGATCA | | TATGAGGTCACTAAGCGGCCCTCAG |
| | | | CCTACTACAGACCGTCCCTCAAGAG | | GGGTCCCTGATCGCTTCTCTGGCTC |
| | | | TCGAGTTACCATATCAGTGGACACG | | CAAGTCTGGCAACACGGCCTCCCTG |
| | | | TCCAAGAACCAGTTCTCCCTGAAGC | | ACCGTCTCTGGGCTCCAGGCTGAGG |
| | | | TGAGCTCTGTGACTGCCGCAGACAC | | ATGAGGCTCATTATTACTGCAGTAC |
| | | | GGCCGTCTTTTACTGTGCCAGAGTT | | ATATGCAGGCAGCGACAATTTGGAG |
| | | | GTCCGTCTATGGCCCAGGTACTTTG | | TTCGGCGGAGGGACCAAGCTGACCG |
| | | | ACTCCTGGGGCCAGGGAACCCTGGT | | TCCTAG |
| | | | CACCGTCTCCTCAG | | |
| | C849 | 479 | CAGGTGCAGCTGGTGCAGTCTGGGG | 480 | TCCTATGAGCTGACACAGCCACCCT |
| | | | CTGAGGTGAAGAAGCCTGGGGCCTC | | CAGTGTCAGTGGCCCCAGGAAAGAC |
| | | | AGTTAAGGTCTCCTGCAGGGCTTCT | | GGCCAGGATTACCTGTGGGGGAGAC |
| | | | GGATACACGTTCACCGACCACTATA | | GACATTGGAAGTAAAAGTGTGCACT |
| | | | TCCACTGGGTGCGACAGGCCCCTGG | | GGTACCAGCAGAAGTCAGGCCAGGC |
| | | | ACAAGGGCTTGAGTGGATGGGATGG | | CCCTGTGTTGGTCATCCATGATGAT |
| | | | ATCAACCCAAACAGTGGTGACACAA | | AGCGACCGGCCCTCAGGGATCCCTG |
| | | | ACTATCCACAGAAGTTTCAGGGCAG | | AGCGATTCTCTGGCTCCAACTCTGG |
| | | | GGTCACCATGGCCAGGGACACGTCC | | GAACACGGCCACCCTGACCATCAGC |
| | | | ATCAGCACAGCCCACATGGAGCTGA | | AGGGTCGAAGCCGGGGATGAGGCCG |
| | | | GGAGGCTGAAATCTGACGACACGGC | | ACTATTACTGTCAGGTGTGGGATTT |
| | | | CGTGTATTACTGTGCGAGGACGTCG | | TACTGGTGATCACCCGGGATGGGTG |
| | | | TCCCCCCATAGCAGCTCGACAGGGG | | TTCGGCGGAGGGACCAAGCTGACCG |
| | | | ACTTTGACTCCTGGGGCCAGGGAAC | | TCCTA |
| | | | CCTGGTCACCGTCTCCTCAG | | |
| | C850 | 481 | CAGGTGCAGCTGCAGGAGTCGGGCC | 482 | GAAATTGTGTTGACGCAGTCTCCAG |
| | | | CAGGACTGGTGAAGCCTTCGGAGAC | | GCACCCTGTCTTTGTCTCCAGGGGA |
| | | | CCTGTCCCTCATCTGCTCTGTCTCT | | AAGAGCCACCCTCTCCTGCAGGGCC |
| | | | GGTGTCTCCGTCAGCAGTAGAAACT | | AGTCAGAGTATTACCAGCAGCTCCT |
| | | | TCTTCTGGAGCTGGATCCGGCAGCC | | TAGCCTGGTACCAGCAGAAACGTGG |
| | | | CCCAGGGAAGGGACTGGAGTGGATT | | CCAACCTCCCAGGCTCCTCATCTAT |
| | | | GGGTATATGTCCTACGGAGGGAACA | | GGTGCATCCAGCAGGGCCACTGGCA |
| | | | CCAATTACAACCCCTCCCTCAAGAG | | TCCCAGACAGGTTCAGTGGCAGTGG |
| | | | TCGAGTCACCATATCAATAGACACG | | GTCTGGGACAGACCTCACTCTCACA |
| | | | TCCAAGAACCAGTTCTCCCTGAAGC | | ATCAGCAGACTGGAGCCTGA |
| | | | TGAGCTCTGTGACCGCTGCGGACAC | | |
| | | | GGCCGTCTATTAC | | |
| | | | TGTGCGAGAGAAACGTATTACTATG | | AGATTTTGCAGTGTATTACTGTCAG |
| | | | ATAGAAGTGGTTATTATTCCTCTGA | | CAGTATGGTAACTCACCGTACACTT |
| | | | CGGATTTGACTACTGGGGACAGGGA | | TTGGCCAGGGGACCAAGCTGGAGAT |
| | | | ATCCTGGTCACCGTCTCCTCA | | CAAAC |
| | C851 | 483 | CAGCTGCAGCTGCAGGAGTCGGGCC | 484 | GACATCCAGATGACCCAGTCTCCAT |
| | | | CAGGACTGGTGAAGACTTCGGAGAC | | CCTCCCTGTCTGCTTCTGTAGGAGA |
| | | | CCTGTCCCTCACCTGCACTGTCTCT | | CAGAGTCACCATCACTTGCCAGGCG |
| | | | GGTGGCTCCATCAGCAGCGGTAATT | | AGTCAGGACATTAGCAGGTATTTAA |
| | | | CCTACTGGGGCTGGATCCGCCAGCC | | ATTGGTTTCAACATAAACCAGGAAA |
| | | | CCCAGGGAAGGGACTGGAGTGGATT | | AGCCCCTAAGCTCCTGATCTACGAT |
| | | | GGCGACATATATTATAGTGGGAGCA | | GCATCCAATTTGGAAGCAGGGGTCC |
| | | | CCTTCTACAACCCGTCCCTCAAGAG | | CATCAAGGTTCACTGGAAGTGGATC |
| | | | TCGACTCACCATATCCGTGGACACG | | TGGGACAGAGTTTACTTTCACCATC |
| | | | TCCAAGAACCAGTTCTCCCTGAAGC | | AGCAGCCTGCAGCCTGAAGATTTTG |
| | | | TGACCTCTGTGACCGCCGCAGACAC | | CAATATATTTCTGTCAACAGTATGA |
| | | | GGCTGTGTATTACTGTGCGAGACGA | | TAGTCTCCCGCTCACTTTCGGCGGC |
| | | | GGTGGCCGGACACCCGTTCGTTTTA | | GGGACCAAGGTGGAGATCA |
| | | | ATTACGGTGGGGACGTCTGGGGCCA | | |
| | | | AGGGACCACGGTCACCGTCTCCTCA | | |
| | C852 | 485 | CAGGTGCAGCTGGTGCAGTCTGGGG | 486 | TCCTATGAGCTGACTCAGCCACCCT |
| | | | CTGAAGTGAAGAAACCTGGGGCCTC | | CAGTGTCATTGGCCCCAGGAAAGAC |
| | | | AGTGAAGGTCTCCTGCAAGGCTTCT | | GGCCAGTATTACCTGTGGGGGAGAC |
| | | | GGATACATATTCACCGGCTTCTATA | | AGCATTGGAAGTAAAAGTGTACACT |
| | | | TGCACTGGGTGCGACAGGCCCCTGG | | GGTACCAACAGAGGCCAGGCCAGGC |
| | | | ACAAGGGCCTGAGTGGATGGGATGG | | CCCTATACTGGTCATCTATTATGAT |
| | | | ATCAACCCTAACAGTGGTGGCACAA | | GGCGACCGGCCCTCAGGGATCCCTG |
| | | | ACTATGCACAGAAGTTTCAGGGCAG | | AACGATTCTCTGGCTCCAACTCTGG |
| | | | GGTCACCATGACCAGGGACACGTCC | | GAACACGGCCACCCTGACCATCAGC |
| | | | ATCAGCACAGCCTACATGGAGCTGA | | AGGGTCGAAGCCGGGGATGAGGCCG |
| | | | GCAGGCTGAGATCTGACGACACGGC | | ACTATTACTGTCAGGTGTGGGATGG |
| | | | CCTGTATTACTGTGCGAGAGGTGGC | | TGGTTGGGTGTTCGGCGGAGGGACC |
| | | | CAAGATGAGCTCACCGGCACTTTTG | | AAGCTGACCGTCCTA |
| | | | ATGTCTGGGGCCAAGGGACAATGGT | | |
| | | | CACCGTCTCTTCAG | | |
| | C853 | 487 | CAGGTGCAGCTGCAGGAGTCGGGCC | 488 | CAGTCTGCCCTGACTCAGCCTCCCT |
| | | | CAGGACTGGTGAAGGCTTCACAGAC | | CCGCGTCCGGGTCTCCTGGACAGTC |
| | | | CCTGTCCCTCACCTGCACTGTCTCT | | AGTCACCATCTCCTGCATTGGAACC |
| | | | GGTGGCTCCTTCCGCAGTGGTGGTT | | AGCAGTGACGTTGGTGGTTATAACT |
| | | | ACTACTACAACTGGATCCGCCAGCA | | ATGTCTCCTGGTACCAACACCACCC |
| | | | CCCAGGGAAGGGCCTGGAGTGGATT | | AGGCAAAGCCCCCAAACTCATCATT |
| | | | GGATATATCTTTTATACTGGGGTCA | | TATGAGGTCAGTAAGCGGCCCTCAG |
| | | | CCTATTACAACCCGTCCCTCAAGAG | | GGGTCCCTGATCGCTTCTCTGGCTC |
| | | | TCGCGTTTCCATATCAGTGGACACG | | CAAGTCTGGCAACACGGCCTCCCTG |
| | | | TCTAAGAACCAGCTCTCCCTGAACC | | ACCGTCTCTGGGCTCCAGGCCGACG |
| | | | TGACCTCTGTGACTGCCGCGGACAC | | ATGAGGCTGATTATTACTGCAGCTC |
| | | | GGCCGTGTATTACTGTGCGAGGGGT | | ATATGCGGGCAGCAACAATTGGGTG |
| | | | TCCTACAGTGACTACAATGGGGGCT | | TTCGGCGGAGGGACCAAGCTGACCG |
| | | | GGGACTACTGGGGCCGGGGAACCCT | | TC |
| | | | GGTCACCGTCTCCTC | | |
| | C854 | 489 | GAGGTGCAGCTGGTGGAGTCTGGAG | 490 | GAAATTGTGTTGACGCAGTCTCCAG |
| | | | GAGGCTTGATCCAGCCTGGGGGGTC | | GCACCCTGTCTTTGTCTCCAGGGGA |
| | | | CCTGAGACTCTCCTGTGCAGCCTCG | | AAGAGCCACCCTCTCCTGCAGGGCC |
| | | | GGGATCACCGTCAGTAGCAACTATA | | AGTCAGAGTGTTAGCAGCAGCTACT |
| | | | TGAACTGGGTCCGCCAGGCTCCAGG | | TAGCCTGGTATCAGCAGAAACCTGG |
| | | | GAAGGGGCTGGAGTGGGTCTCAGTT | | CCAGGCTCCCAGGCTCCTCATCTAT |
| | | | CTTTATGCCGGT | | GGTGCATCCAGCAG |
| | | | GGTAGTACATTTTACGCAGACTCCG | | GGCCACTGGCATCCCAGACAGGTTC |
| | | | TGAAGGGCCGATTCACCATCTCCAG | | AGTGGCAGGGGGTCTGGGACAGACT |
| | | | AGACGATTCCAAGAACACACTGTAT | | TCACTCTCACCATCAGCAGACTGGA |
| | | | CTTCAAATGGACAGCCTGAGAGCCG | | GCCTGAAGATTTTGCAGTGTATTAC |
| | | | AGGACACGGCCGTGTATTACTGTGC | | TGTCAGCAGTATGGTAGCTTGTACA |
| | | | GAGAGATCTAAGCAGTAGCGGGGGA | | CTTTTGGCCAGGGGACCAAGCTGGA |
| | | | TTTGACTACTGGGGCCAGGGAACCC | | GATCAAAC |
| | | | TGGTCACCGTCTCCTCAG | | |
| | C855 | 491 | CAGGTGCAGCTGGTGGAGTCTGGGG | 492 | QVQLVESGGGVVQPGRSLRLSCAAS |
| | | | GAGGCGTGGTCCAGCCTGGGAGGTC | | GFAFSTYGMHWVRQTPGKGLAWVAA |
| | | | CCTGAGACTCTCCTGTGCAGCCTCT | | ISYDGRNTYYGDSVKGRFTITRDNS |
| | | | GGATTCGCATTCAGTACCTATGGTA | | KNTLYLQLNSLRDEDTALYYCARDA |
| | | | TGCACTGGGTCCGTCAGACTCCAGG | | TMITLVRGIMGPPFDHWGQGSLVTV |
| | | | CAAGGGGCTGGCGTGGGTGGCGGCT | | SS |
| | | | ATTTCATATGATGGACGTAATACAT | | |
| | | | ACTACGGAGACTCCGTGAAGGGCCG | | |
| | | | ATTCACCATTACCAGAGACAATTCC | | |
| | | | AAGAACACGCTGTATTTGCAACTGA | | |
| | | | ACAGTCTGAGAGATGAGGACACGGC | | |
| | | | TCTGTATTATTGTGCGAGAGATGCG | | |
| | | | ACTATGATTACTCTGGTTCGGGGAA | | |
| | | | TTATGGGACCACCCTTTGATCACTG | | |
| | | | GGGCCAGGGATCCCTGGTCACCGTC | | |
| | | | TCCTCAG | | |
| | C856 | 493 | CAGGTGCAGCTGGTGGAGTCTGGGG | 494 | GACATCCAGATGACCCAGTCTCCAT |
| | | | GAGGCGTGGTCCAGCCTGGGAGGTC | | CCTCCCTGTCTGCATCTGTAGGAGA |
| | | | CCTGAGACTCTCCTGTGCAGCCTCT | | CAGAGTCACCATCACTTGCCAGGCG |
| | | | GGATTCACCTTCAGTAGCTATGGCA | | AGTCAGGACATTAGCAACTATTTAC |
| | | | TGCACTGGGTCCGCCAGGCTCCAGG | | ATTGGTATCAGCAGAAACCAGGGAA |
| | | | CAAGGGGCTGGAGTGGGTGGCAGTT | | AGCCCCTAAGCTCCTGATCTACGAT |
| | | | ATATCATATGATGGAAGTAATAAAT | | GCATCCAATTTGGAAACAGGGGTCC |
| | | | ACTATGCAGACTCCGTGAAGGGCCG | | CATCAAGGTTCAGTGGAAGTGGATC |
| | | | ATTCACCATCTCCAGAGACAATTCC | | TGGGACAGATTTTACTTTCACCATC |
| | | | AAGAACACGCTGTATCTGCAAATGA | | AGCAGCCTGCAGCCTGAAGATATTG |
| | | | GCAGCCTGAGAGCTGAGGACACGGC | | CAACATATTACTGTCAACAGTATGA |
| | | | TGTGTATTACTGTGCGAAGCAAATC | | TAATCTCCCATTCACTTTCGGCCCT |
| | | | GGGGAATATTGTAGTGGTGGTAGCT | | GGGACCAAAGTGGATATCAAAC |
| | | | GCTACCAGGGGAGTCTTGACTACTG | | |
| | | | GGGCCAGGGAACCCTGGTCACCGTC | | |
| | | | TCCTCAG | | |
| | C857 | 495 | CAGGTGCAGCTGCAGGAGTCGGGCC | 496 | GAAATTGTGTTGACACAGTCTCCAG |
| | | | CAGGACTGGTGAAGCCTTCACAGAC | | CCACCCTGTCTTTGTCTCCAGGGGA |
| | | | CCTGTCCCTCACCTGCACTGTCTCT | | AAGAGCCACCCTCTCCTGCAGGGCC |
| | | | GGTGGCTCCATCAGCAGTGGTGGTT | | AGTCAGAGTGTTAGCACCTACTTAG |
| | | | ACTACTGGAGCTGGATCCGCCAGCA | | CCTGGTACCAACAGAAACCTGGCCA |
| | | | CCCAGGGAAGGGCCTGGAGTGGATT | | GGCTCCCAGGCTCCTCATCTATGAT |
| | | | GGGTACATCTATTACAGTGGGAGCA | | GCATCCAACAGGGCCACTGGCATCC |
| | | | CCTACTACAACCCGTCCCTCGAGAG | | CAGCCAGGTTCAGTGGCAGTGGGTC |
| | | | TCGAGTTACCATATCAGTAGACACG | | TGGGACAGACTTCACTCTCACCATC |
| | | | TCTAAGAACCAGTTCTCCCTGAAGC | | AGCAGCCTAGAGCCTGAAGATTTTG |
| | | | TGAGCTCTGTGACTGCCGCGGACAC | | CAGTTTATTACTGTCAGCAGCGTAG |
| | | | GGCCGTGTATTACTGTGCGAGCGGG | | CAACTGGCTATTCACTTTCGGCCCT |
| | | | GAACTCTCCGCGTTCGGGGAGTTAT | | GGGACCAAAGTGGATATCAAAC |
| | | | TTCCGCACGACTACTGGGGCCAGGG | | |
| | | | AACCCTGGTCACCGTCTCCTCAG | | |
| | C858 | 497 | CAGGTGCAGCTGGTGGAGTCTGGGG | 498 | GACATCCAGATGACCCAGTCTCCAT |
| | | | GAGGCGTGGTCCAGCCTGGGAGGTC | | CCTCCCTGTCTGCATCTGTAGGAGA |
| | | | CCTGAGACTCTCCTGTGCAGCCTCT | | CAGAGTCACCATCACTTGCCGGGCA |
| | | | GGATTCACCTTCAGTAGCTATGCTA | | AGTCAGAGCATTAGCAGCTATTTAA |
| | | | TGCACTGGGTCCGCCAGGCTCCAGG | | ATTGGTATCAGCAGAAACCAGGGAA |
| | | | CAAGGGGCTGGAGTGGGTGGCAGTT | | AGCCCCTAAGCTCCTGATCTATGCT |
| | | | ATATTATATGATGGAAGCAATAAAT | | GCATCCAGTTTGCAAAGTGGGGTCC |
| | | | ACTACGCAGATTCCGTGAAGGGCCG | | CATCAAGGTTCAGTGGCAGTGGATC |
| | | | ATTCACCATCTCCAGAGACAATTCC | | TGGGACAGATTTCACTCTCACCATC |
| | | | AAGAACACGCTGTATCTGCAAATGA | | AGCAGTCTGCAACCTGAAGATTTTG |
| | | | ACAGCCTGAGAGCTGAGGACACGGC | | CAACTTACTTCTGTCAACAGAGTTA |
| | | | TGTGTATTACTGTGCGAGAGATCAG | | CAATACCCCTCCGTGGACGTTCGGC |
| | | | GGGATGGCTACAACCTACTTTGACT | | CAAGGGACCAAGGTGGAGATCAAAC |
| | | | ACTGGGGCCAGGGAACCCTGGTCAC | | |
| | | | CGTCTCCTCAG | | |
| | C859 | 499 | CAGGTGCAGCTGGTGCAGTCTGGGG | 500 | TCCTATGAGCTGACTCAGTCACCCT |
| | | | CTGAGCTGAAGAAGCCTGGGGCCTC | | CAGTGTCAGTGGCCCCAGGAAAGAC |
| | | | AGTGAGGGTCTCCTGCAAGGCTTCT | | GGCCAGGATTACCTGTGGGGGAAGG |
| | | | GGATACACCTTCACCGACTACTATA | | GACATTGGAAGTAAAAGTGTGCACT |
| | | | TCCACTGGGTTCGACAGGCCCCTGG | | GGTACCAGCAGAGGCCGGGCCAGGC |
| | | | ACAAGGGTTTGAGTGGATGGGCTGG | | CCCTGTGCTGGTCATCTCTTATGAT |
| | | | ATCAACCCTGACAGTGGTGGCACAA | | AATGACCGGCCCTCAGGGATCCCTG |
| | | | ACTATCCACAGAACTTTCAGGGCAG | | AGCGATTCTCTGGCTCCAACTCTGG |
| | | | GGTCACCATGACCAGGGGCACGTCC | | GAACACGGCCACCCTGACCATCAGC |
| | | | ATCAGCACAGCCTACGTGGAACTGA | | AGGGTCGAAGCCGGGGATGAGGCCG |
| | | | CCAGGCTGAGATTTGACGACACGGC | | ACTATTACTGTCAGGTGTGGGACGG |
| | | | CGTGTATTACTGTGCGAGGACGTCC | | TACTGGTGATCACCCGGGATGGGTG |
| | | | TCCCCCCATAGCAGCTCGACAGGGG | | TTCGGCGGAGGGACCAGGCTGACCG |
| | | | ACCTTGACTACTGGGGCCAGGGAAC | | TCCTAG |
| | | | CCTGGTCACCGTCTCCTC | | |
| | C860 | 501 | CAGGTGCAGCTGGTGCAGTCTGGGG | 502 | TCCTATGAGCTGACTCAGCCACCCT |
| | | | CTGAGGTGAAGAAGCCTGGGGCCTC | | CAGTGTCAGTGGCCCCAGGAAAGAC |
| | | | AGTGAAGGTCTCCTGCAAGGCTTCT | | GGCCAGGATTACCTGTGGGGGAAAC |
| | | | GGATACACCTTCACCGGCTACTATA | | AGCATTGGAAGTAAAAGTGTGCACT |
| | | | TGCACTGGGTGCGACAGGCCCCTGG | | GGTACCAGCAGAAGCCAGGCCAGGC |
| | | | ACAAGGGCTTGAGTGGATGGGATGG | | CCCTGTGCTGGTCATCTATTATGAT |
| | | | ATCAACCCTAACAGTGGTGGCACAA | | AGCGACCGGCCCTCAGGGATCCCTG |
| | | | ACTATGCACAGAAGTTTCAGGGCAG | | AGCGATTCTCTGGCTCCAACTCTGG |
| | | | GGTCACCATGACCAGGGACACGTCC | | GAACACGGCCACCCTGACCATCAGC |
| | | | ATCAGCACAGCCTACATGGAGCTGA | | AGGGTCGAAGCCGGGGATGAGGCCG |
| | | | GCAGGCTGACATCTGACGACACGGC | | ACTTTCACTGTCAGGTGTGGGATAG |
| | | | CGTGTATTACTGTGCGAGAGGTGGC | | TGGTTGGGTGTTCGGCGGAGGGACC |
| | | | CAAGATGAGCTCACCGGCGCTTTTG | | AAGCTGACCGTCCTAG |
| | | | ATATCTGGGGCCAAGGGACAATGGT | | |
| | | | CACCGTCTCTTCAG | | |
| | C861 | 503 | CAGGTGCAGCTGCAGGAGTCGGGCC | 504 | CAGTCTGCCCTGACTCAGCCTCCCT |
| | | | CAGGACTGGTGAAGCCTTCACAGAC | | CCGCGTCCGGGTCTCCTGGACAGTC |
| | | | CCTGTCCCTCACCTGCACTGTCTCT | | AGTCACCATCTCCTGCACTGGAACC |
| | | | GGTGGCTCCATCAGCAGTGGTGGTT | | AGCAGTGACGTTGGTGGTTATAACT |
| | | | ACTACTGGGGCTGGATCCGCCAGCA | | ATGTCTCCTGGTACCAACAGCACCC |
| | | | CCCAGGGAAGGGCCTGGAGTGGATT | | AGGCAAAGCCCCCAAACTCATGATT |
| | | | GGGTACATCTATTACAGTGGGAGCA | | TATGAGGTCAGTAAGCGGCCCTCAG |
| | | | CCTACTACAACCCGTCCCTCAAGAG | | GGGTCCCTGATCGCTTCTCTGGCTC |
| | | | TCGAGTTACCATATCAGTAGACACG | | CAAGTCTGGCAACACGGCCTCCCTG |
| | | | TCTAAGAACCAGTTCTCCCTGAAGC | | ACCGTCTCTGGGCTCCAGGCTGAGG |
| | | | TGAGCTCTGTGACTGCCGCGGACAC | | ATGAGGCTGATTATTACTGCAGCTC |
| | | | GGCCGTGTATTA | | ATATGCAGGCAG |
| | | | CTGTGCGAGGGGTTCCTACAGTAAC | | CAACAATTGGGTGTTCGGCGGAGGG |
| | | | TACAATGGGGGGTTGGACTACTGGG | | ACCAAGCTGACCGTCCTAG |
| | | | GCCAGGGAACCCTGGTCACCGTCTC | | |
| | | | CTCAG | | |
| | C862 | 505 | CAGGTGCAGCTGCAGGAGTCGGGCC | 506 | GACATCCAGATGACCCAGTCTCCAT |
| | | | CAGGACTGGTGAAGCCTTCACAGAC | | CCTCCCTGTCTGCATTTGTAGGAGA |
| | | | CCTGTCCCTCACCTGCACTGTCTCT | | CAGAGTCACCATCACTTGCCAGGCG |
| | | | GGTGCCTCCATCAGCAGTAGTGAAC | | AGTCAGGACATCAATAAGTATGTAA |
| | | | ACTACTGGAGTTGGATCCGCCAGCC | | ATTGGTATCAGCAGAAACCAGGGAA |
| | | | CCCAGGGAAGGGCCTGGAGTGGATT | | AGCCCCTAAGCTCCTGATCTACGAT |
| | | | GGGTACATCTCTTATAGTGGGGGCA | | GCATCCAATTTGCAAACAGGGGTCC |
| | | | CCTACCAAAACCCGTCCCTCCAGAG | | CATCAAGGTTCAGTGGAAGTGGATC |
| | | | TCGAATGACCCTGTCAATGGACGCG | | TGGGACACATTTTACTTTCACCATC |
| | | | TCCAAGAACCAGTTCTCCCTGAAGT | | AGCAGCCTGCAGCCTGAAGATTTTG |
| | | | TGAGCTCTGTGACTGCCGCAGACAC | | CAACATATTACTGTCAAGAATATGA |
| | | | GGCCGTGTATTTCTGTGCCAGACTA | | TAATCTCTTTTCGATTAGTTTCGGC |
| | | | AATACTATGATCGTCATGATCAATG | | CAAGGGACACGACTGGAGATTAAAC |
| | | | GTGTTTTTGATGTCTGGGGCCAAGG | | |
| | | | GACAATGGTCACCGTCTCTTCAG | | |
| | C863 | 507 | GAGGTGCAGCTGTTGGAGTCTGGGG | 508 | GAAATTGTGTTGACGCAGTCTCCAG |
| | | | GAGGCTTGGTACGGCCGGGGGGGTC | | GCACCCTGTCTTTGTCTCCAGGGGA |
| | | | CCTGAGACTCTCCTGTGCAGCCTCT | | AAGAGCCACCCTCTCCTGCAGGGCC |
| | | | GGATTCATCTTTGGCAGCTATGCCA | | CGTCAGGGTGTTAGCAGCACCTACT |
| | | | TGACCTGGGTCCGCCAGGCTCCAGG | | TAGCCTGGTACCAGCAGAAACCTGG |
| | | | GAAGGGGCTGGAGTGGGTCTCTACT | | CCAGGCTCCCAGGCTCCTCATCTAC |
| | | | ATTAGTGGTGGTGGAACTTCCACAG | | GGTGCATCCAGCAGGGCCACTGGCA |
| | | | ACTACGCAGACTCCGTGAAGGGCCA | | TCCCAGACAGGTTCAGTGGCAGTGG |
| | | | TTTCACCATCTCAAGAGACAATGGC | | GTCTGGGGCAGACTTCACACTCACC |
| | | | AAGAACACACTGTATCTGCAAATGA | | ATCAGCAGACTGGAGCCTGAAGATT |
| | | | ACAGCCTGAGAGCCGAGGACACGGC | | TTGCAGTATATTACTGTCAGCAGTA |
| | | | CGTATATTACTGTGTGAAAGAGAGT | | TGGTACCTCACCGTACACTTTTGGC |
| | | | GATTATTATATGGCCAGTGTGAACG | | CAGGGGACCAAGCTGGAGATCAAAC |
| | | | GTATGGACGTCTGGGGCCATGGGAC | | |
| | | | CACGGTCACCGTCTCCTCA | | |
| | C864 | 509 | CAGGTGCAGCTGGTGCAGTCTGGGC | 510 | GAAATTGTGTTGACGCAGTCTCCAG |
| | | | CTGAGGTGAAGAAGCCTGGGACCTC | | GCACCCTGTCTTTGTCTCCAGGGGA |
| | | | AGTGAAGGTCTCCTGCAAGGCCTTT | | AAGAGCCACCCTCTCCTGCAGGGCC |
| | | | CAATTAAGTTTTAGTGTCTCTGCTG | | AGTCAGAGTGTTAACAGCAACTATT |
| | | | TGCAGTGGGTGCGACAGGCTCGTGG | | TAGCCTGGTACCAGCAAAAACCTGG |
| | | | ACAACGCCTTGAGTGGATAGGATGG | | CCAGGCTCCCAGGCTCCTCATCTTT |
| | | | ATCGTCGTTGGCAGTGGCAACACAA | | GGTCCATCCAACAGGGCCACTGGCA |
| | | | ACTACGCACAGAAGTTCCAGGAAAG | | TCCCAGACAGGTTCAGTGGCAGTGG |
| | | | AGTCACCATTACCAGGGACATGTCC | | GTCTGGGACAGACTTCACTCTCACC |
| | | | ACAAGTACAGTCTATATGGAGGTGC | | ATCAGTAGACTGGAGTCTGAAGATT |
| | | | GCAGTCTAAGATCCGAGGACACGGC | | TTGCAGTGTATTACTGTCAACAATA |
| | | | CGTGTATTATTGTGCGGCGCCCCAA | | TGGTAGCTCACCGTGGACGTTCGGC |
| | | | TGTAATCGCACCACCTGTTATGATG | | CAAGGGACCAAGGTGGAAATCAAAC |
| | | | CTTTTGATATGTGGGGCCAAGGGAC | | |
| | | | AATGGTCACCGTCTCTTCAG | | |
| | C865 | 511 | GAGGTGCAGCTGTTGGAGTCTGGGG | 512 | GACATCCAGTTGACCCAGTCTCCAT |
| | | | GAGGCTTGGTACAGCCGGGGGGGTC | | CCTCCCTGTCTGCATCTGTCGGAGA |
| | | | CCTAAGACTCTCCTGTGTAGCCTCT | | CAGAGTCACCATCACTTGCCGGGCA |
| | | | AGATTCATCTTTAGCAGATATGCCT | | AGTCAGGGCATTAGCAGTGCTTTAG |
| | | | TGAGCTGGGTCCGCCAGGCTCCAGG | | CCTGGTATCAGCAGAGACCAGGGAA |
| | | | GAAGGGGCTGGAGTGGGTCTCAGGT | | AGCTCCTAGGCTCCTGATCTATGAT |
| | | | ATTAGTGGTAGTGGTCATAGCACAC | | GCCTCCAGTTTGGATAGTGGGGTCC |
| | | | ACTACGCAGACTCCGTGACGGGCCG | | CATCAAGGTTCAGCGGCAGTGGATC |
| | | | GTT | | TGGGA |
| | | | CACCATCTCCAGAGACAATTCCAAG | | CAGATTTCACTCTCACCATCAGCAG |
| | | | AACACGGTGTATCTGCAAATGAGCA | | CCTGCAGTCTGAAGACTTTGCAACT |
| | | | GCCTGAGAGCCGAGGACACGGCCGT | | TATTACTGTCAACAGTTTATTAATA |
| | | | ATATTACTGTGCGAAAGGCCCGAGG | | ACCCGCTCACTTTCGGCGGAGGGAC |
| | | | AGTAACTACGACTACTTTGAGTCCT | | CAAGGTGGAAATCAAAC |
| | | | GGGGCCAGGGAACCCTGGTCACCGT | | |
| | | | CTCCTCAG | | |
| | C866 | 513 | GAAGTGCAGCTGGTGGAGTCTGGGG | 514 | GACATCCAGTTGACCCAGTCTCCAT |
| | | | GAGGCTTGGTACAGCCTGGCAGGTC | | CTTCTGTGTCTGCATCTGTAGGAGA |
| | | | CCTGAGACTCTCCTGTGTAGCCTCT | | CAGAGTCACCATCACTTGTCGGGCG |
| | | | GGATTCGAATTTGAAGATTATGGCA | | AGTCAGGGTATTAGCAACTGGTTAG |
| | | | TGCACTGGGTCCGGCAAGTTCCAGG | | CCTGGTATCAGAAGAAACCAGGGAA |
| | | | GAAGGGCCTGGAGTGGGTCTCAGGT | | AGCCCCTAAACTCCTGATCTATGCT |
| | | | ATTAGTTGGAACAGTGCTAGTGTAG | | ACATCCAGTTTGCAAAGTGGGGTCC |
| | | | GCTATGCGGACTCTGTGAGGGGCCG | | CATCAAGGTTCAGCGGCAGTGGATC |
| | | | ATTCACCATCTCCAGAGACAACGCC | | TGAGACAGATTTCACTCTCACTATC |
| | | | AAGAACTCCCTGTATCTGCAAATGA | | CGCAGCCTGCAGCCTGAAGATTTTG |
| | | | ACAGTCTGAGAGCTGAGGACACGGC | | CAACTTACTATTGTCAACAGGCTAA |
| | | | CTTATATTACTGTGGAAAACAGATA | | CAGTTACCCCTTAACTTTTGGCCAG |
| | | | AATGAGTGGTCACACTTCCTTGACT | | GGGACCAAGCTGGAGATCAAAC |
| | | | ACTGGGGCCAGGGAACCCTGGTCAC | | |
| | | | CGTCTCCTCAG | | |
| | C867 | 515 | CAGGTGCAGCTGCAGGAGTCGGGCC | 516 | CAGTCTGCCCTGACTCAGCCTCCCT |
| | | | CAGGACTGGTGAAGTCTTCAGAGAC | | CCGCGTCCGGGTCTCCTGGCCAGTC |
| | | | CCTGTCCCTCACCTGCACTGTCTCG | | AGTCACCATCTCCTGCACTGGCACC |
| | | | AGTGGCTCCGTCAGGAGTGGTGGTT | | AGCAGTGACGTTGGTGGTCATAACT |
| | | | ACTACTGGAGTTGGATCCGCCACCA | | ATGTCTCCTGGTACCAACAATTCCC |
| | | | CCCAGGGAAGGGCCTGGAGTGGATT | | AGGCAAAGCCCCCAAACTCATCATT |
| | | | GGCTACATCTTTTACACTGGCATCA | | TATGATGTCAATAAGCGGCCCTCAG |
| | | | CCTACTACAACCCGTCCCTCAAGAG | | GGGTCCCTGATCGCTTCTCTGGCTC |
| | | | TCGAGTTATTGTGTCAGTGGACCCG | | CAAGTCTGCCAACACGGCCTCCCTG |
| | | | TCTAAGAACCAATTCTCCCTGAACC | | ACCGTCTCTGGGCTCCAGGCTGAGG |
| | | | TGACCTCTGTGACTGCCGCGGACAC | | ATGAGGCTGATTATCACTGCAGCTC |
| | | | GGCCGTCTATTACTGTGCGAGTACG | | ATATGCCGGCAGCAACAATTGGGTG |
| | | | CCTTATACTAATGGCGGGGCTTTTC | | TTCGGCGGAGGGACCAAGCTGACCG |
| | | | ATATCTGGGGCCAAGGGACAATGGT | | TCCTA |
| | | | CACCGTCTCTTCAG | | |
| | C868 | 517 | CAGGTGCAGCTGCAGGAGTCGGGCC | 518 | GACATCCAGATGACCCAGTCTCCTT |
| | | | CAAGACTGGTGAAGCCTTCGGAGAC | | CCACCCTGTCTGCATCTGTGGGAGA |
| | | | CCTGTCCCTCACCTGCATTGTCTCC | | CAGAGTCACCATCAGTTGCCGGGCC |
| | | | GGTGGCTCCGTCAGTAGTAATAATT | | AGTCAGAATATTAGTAGCTGGTTGG |
| | | | TCTACTGGAGTTGGATCCGGCAGCC | | CCTGGTATCAGCAAGAAGCAGGGAA |
| | | | CCCAGGGAAGCGACTGGAGTGGATT | | AGCCCCTAAGCTCCTGATCTATAAG |
| | | | GGGTATTTCTATAACAGTGGGAGCT | | GCGTCTAGTTTAGAAAGTGGGGTCC |
| | | | CCAAGTATAATCCCTCCCTGAAGAG | | CATCGAGGTTCAGCGGCAGTGGATC |
| | | | TCGAGTCACCATATCAGGAGACACG | | TGGGACAGAGTTCACTCTCACCATC |
| | | | TCCAAGAACCAGTTCTCCCTGAAGC | | AGCAGCCTGCAGCCTGGTGATTTTG |
| | | | TGTCCTCTGTGACCGCTGCGGACAC | | CAACTTATTACTGCCAACAGTATAA |
| | | | GGCCGTGTATTACTGTGCGAGAGAA | | TATTTATTCGTACACTTTTGGCCAG |
| | | | ACGTTTTTCTATGACAGGACTGGTC | | GGGACCAAGCTGGAGATCAAAC |
| | | | ATTACAAATCCGATGGTTTTGATGT | | |
| | | | CTGGGGCCAAGGGACAATGGTCACC | | |
| | | | GTCTCTTCAG | | |
| | C869 | 519 | CAGGTGCAGCTGGTGGAGTCTGGGG | 520 | GACATCCAGATGACCCAGTCTCCAT |
| | | | GAGGCGTGGTCCAGCCTGGGACGTC | | CCTCCCTGTCTGCATCTGTTGGAGA |
| | | | CCTGAGACTCTCCTGTGCAGCGTCT | | TAGAGTCACCATCACTTGCCGGGCA |
| | | | GGATTCACCTTCAGTAGCTTTGGCA | | AGTCAGGACATTAGAGATGATTTAA |
| | | | TGAACTGGGTCCGCCAGGCTCC | | ACTGGTATCAACACAAACCAGGGAA |
| | | | AGGCAAGGGCCTGGAGTGGGTGGCA | | AGCCCCGAAACTCCTGATCTATACT |
| | | | GTTATATTCTTTGATGGGAGTAAAA | | GCATCCAGTTTACAAAGTGGGGTCC |
| | | | CATATTATGCAGACTCCGTGAAGGG | | CATCAAGGTTCAGCGGCAGTGGATC |
| | | | CCGATTCACCATCTCCAGAGACAAC | | TGGCACAGATTTCACTCTCACCATC |
| | | | TCCAAGAACACGCTGTATCTGCAAA | | AGCAGGCTGCAGCCTGAGGATTTTG |
| | | | TGAACAGCCTGAGAACTGAGGACAC | | CAAGTTATTACTGCCTACAGGATCA |
| | | | GGCTGTGTATTACTGTGCGAAGGGG | | CAATTACCCGCTCACTTTTGGCCAG |
| | | | CAACTGCGTTTGGGGGAGTTCGATG | | GGGACCAAGCTGGAGATCAAAC |
| | | | ACTACTGGGGCCAGGGAACCCTGGT | | |
| | | | CACCGTCTCCTCAG | | |
| | C870 | 521 | GAGGTGCAGCTGGTGGAGTCTGGGG | 522 | CAGTCTGCCCTGACTCAGCCTGCCT |
| | | | GAGGCTTGGTACAGCCTGGGAAGTC | | CCGTGTCTGGGTCTCCTGGACAGTC |
| | | | CCTGAGACTCTCCTGTGCAGGCTCT | | AGTCACCATCTCCTGCACTGGAACC |
| | | | GGATTCGCCTTCAGTTCCTATCACA | | CGCAGTGATGTTGGGAGTTATGACC |
| | | | TGAACTGGGTCCGCCAGGCTCCAGG | | TTGTCTCCTGGTACCAACTCCACGC |
| | | | GAAGGGTCTGGAGTGGGTTGCATAT | | AGACAAGGCCCCCAAACTCATAATT |
| | | | ATTAGTAGTGGAAGTAGTACCATAC | | TATGAGGTCACTTCGCGGCCCTCAG |
| | | | ACTACGCAGACTCTGTGAAGGGCCG | | GAATTTCTACTCGGTTCTCTGGCTC |
| | | | ATTCACCATCTCCAGGGACAATGCC | | CAAGTCTGGCAACACGGCCTCCCTG |
| | | | AAGAACTCATTCTATCTGCAAATGA | | ACAATCTCTGGGCTCCAGGCTGAGG |
| | | | ACAGCCTGAGAGCCGAGGACACGGC | | ACGAGGCGGATTATTACTGCTGCTC |
| | | | TCTGTATTACTGTGCGAGAGCTATA | | ATATGCAGGTACTACATGGCTGTTC |
| | | | GTGGGAACGAAGGGTTACATGGACG | | GGCGGAGGGACCAGGCTGACCGTCC |
| | | | TCTGGGGCAAGGGGACCACGGTCAC | | TAG |
| | | | CGTCTCCTCA | | |
| | C950 | 523 | CAGGTGCAGCTGGTGGAGTCTGGGG | 524 | CAGTCTGTGCTGACTCAGCCACCCT |
| | | | GAGGCTTGGTCAAGCCTGGAGGGTC | | CAGCGTCTGGGACCGCCGGGCAGAG |
| | | | CCTGAGACTCTCCTGTGCAGCCTCT | | GGTCACCATCTCTTGTTCTGGAGGC |
| | | | GGATTCACCTTCAGCGACTACTGCG | | AGCTCCAACATCGGAAGTAATACTG |
| | | | TGACCTGGATCCGCCAGGCTCCAGG | | TACACTGGTACCAACAACTCCCAGG |
| | | | GAAGGGGCTGGAGTGGCTTTCATAC | | AACGGCCCCCAAACTCCTCATCTAT |
| | | | AGTAATACTAATGATAGTAGTAGAT | | AGCAATTACAAGCGGCCCTCAGGGG |
| | | | CCTACGCAGACTCTGTGAAGGGCCG | | TCCCTGACCGATTCTCTGGCTCCAA |
| | | | CTTCACCATCTCCAGGGACAACGCC | | GTCTGGCGCCTCAGCCTCCCTGGCC |
| | | | AAGAATTCACTGTATCTGCAAATGG | | ATCAGTGGGCTCCAGTCTGAGGATG |
| | | | ACAGCCTGAGAGCCGAAGACACGGC | | AGGCTGAATATTACTGTGCAGCATG |
| | | | CGTGTATTACTGTGCGAGAAGGGGG | | GGACGACAGTGCGAATGGTCCGATA |
| | | | GACGGAAACGTCCCGCTCTTCCATT | | TTCGGCGGAGGGACCAAACTGACCG |
| | | | ATTACTATATGGACGTCTGGGGCAA | | TCCTAG |
| | | | AGGGACCACGGTCACCGTCTCCTCA | | |
| COV47 | C871 | 525 | GAGGTGCAGCTGGTGGAGTCTGGAG | 526 | CAGTCTGCCCTGACTCAGCCTGCCT |
| | | | GAGGCTTGATCCAGACGGGGGGGTC | | CCGTGTCTGGGTCTCCTGGACAGTC |
| | | | CCTGAAACTCTCCTGTGCAGCCTCT | | GATCACCATCTCCTGCACTGGAACC |
| | | | GGATTCATCGTCACTAATAACTACA | | AGCAGTGACGTTGGTGGTTATAACT |
| | | | TGAGTTGGGTCCGCCAGGCTCCCGG | | ATGTCTCCTGGTACCAACAACACCC |
| | | | GAAGGGGCTGGAGTGGGTCTCAGTG | | AGGCAAAGCCCCCAAACTCATGATT |
| | | | ATTTATAGTGGTGGTACCACATATT | | TATGATGTCAGTAATCGGCCCCCAA |
| | | | ATGCAGACTCCGTGAAGGGGCGATT | | CGATTTCTAATCGCTTCTCTGGCTC |
| | | | CACCATCTCCAGAGACATTTCGAAG | | CAAGTCTGGCAATACGGCCTCCCTG |
| | | | AACACGTTGTATCTTCAAATGAACA | | ATTATCTCTGGGCTCCAGCCTGAGG |
| | | | GCCTGAAAGCCGAGGATACGGCCGT | | ACGAGGCTGATTATTATTGCAGCTC |
| | | | GTATTATTGTGCGAGAGAGGGGGAC | | ATTTACAAGCAACAACACTCGAGTC |
| | | | GTAGAAGGGATTTCCGATTCCTGGA | | TTCGGAACTGGGACCAAGGTCACCG |
| | | | GTGGTTACTCTAGAGACCGCTACTA | | TCCTAG |
| | | | TTTTGACCACTGGGGCCAGGGAACC | | |
| | | | CTGGTCACCGTCTCCTCAG | | |
| | C872 | 527 | GAGGTGCAGCTGGTGGAGTCTGGAG | 528 | CAGTCTGCCCTGACTCAGCCTGCCT |
| | | | GAGGCTTGATCCAGCCTGGGGGGTC | | CCGTGTCTGGGTCTCCTGGACAGTC |
| | | | CCTGAGACTCTCCTGTGCAGCCTCT | | GATCACCATCTCCTGCACTGGAACC |
| | | | GGGTTCATCGTCAGCAACAATTACA | | AGCAGTGACGTTGGTGCTTACAACT |
| | | | TCAGCTGGGTCCGCCAGGCTCCAGG | | ATGTCGCCTGGTACCAACAGCACCC |
| | | | GAAGGGGCTGGAGTGGGTCTCAGTC | | AGGCAAAGCCCCCAAACTCATGGTT |
| | | | ATTTATAGCGGTGGAACGACATACT | | TATGATGTCAGTAAACGGCCCTCAG |
| | | | ACGCAGACTCCGTGAAGGGCCGATT | | GGGTTTCTAATCGCTTCTCTGGCTC |
| | | | CAGCATCTCCAGAGACACTTCCAAG | | CAAGTCTGGCAACACGGCCTCCCTG |
| | | | AACACAGTATATCTTCAAATAAACA | | ACCATCTCTGGGCTCCAGACTGAGG |
| | | | ACCTGAGAGCCGAGGACACGGCCGT | | ACGAGGGTGATTATTACTGCTGCTC |
| | | | GTATTATTGTGCAAGAGAGGGGGAC | | TTATACAACCAACACCACTCGAGTC |
| | | | GTAGACGGGAATTACGGTTTTTGGA | | TTCGGAACTGGGACCATGCTCACCG |
| | | | GTGGATATTCTAGAGACCGTTATTA | | TCCTA |
| | | | CTTTGACTACTGGGGCCAGGGAACC | | |
| | | | CTGGTCACCGTCTCCTCAG | | |
| | C873 | 529 | CAGGTGCAGCTGGTGCAGTCTGGGC | 530 | CAGTCTGCCCTGACTCAGCCTGCCT |
| | | | CTGAGGTGAAGAAGCCTGGGGCCTC | | CCGTGTCTGGGTCTCCTGGACAGTC |
| | | | AGTGAAGGTCTCCTGTAAGGCTTCT | | GGTCACCATCTCCTGCACTGGAACC |
| | | | GGATACATCTTCACCGACTATTCTA | | AGCAGTGACGTTGGTGGTTACAACT |
| | | | TACACTGGGTGCGACAGGCCCCTGG | | TTTTGTCCTGGTATCAACAACACCC |
| | | | ACAGGGGCTTGAGTGGATGGGATGG | | AGGCAAAGCCCCCAAACTCCTGCTT |
| | | | ATCAACCCTAATAGTGGAGGCGGAA | | TATGAGGTCATTAATCGGCCCTCAG |
| | | | ACTCTGCACAGATTTTTAAGGGCCG | | GGGTCTCTGATCGCTTCTCTGGCTC |
| | | | GGCCACCATGGCCAGGGACACAAGT | | CAAGTCTGGCAACACGGCCTCCCTG |
| | | | ATCACCACAGTTTATATGGACCTGA | | ACCATCTCTGGGCTCCAGGCTGAGG |
| | | | GTGGGCTGAGATCTGACGACACGGC | | ACGAGGCTGATTATTACTGCAACTC |
| | | | CGTGTACTATTGTGCGAGAGGTCCC | | ATATACAAGCAACTTCACTTGGGTG |
| | | | TTATTTCACAAAGTAGTCTACGAAT | | TTCGGCGGAGGGACCCACCTGACCG |
| | | | CTTCGAGTGGCTTTCATGACGGCTT | | TCCT |
| | | | GGATTTCTGGGGCCAAGGGACAATG | | |
| | | | GTCACCGTCTCTTCAG | | |
| | C874 | 531 | CAGGTGCAGCTGGTGGAGTCTGGGG | 532 | AATTTTATGCTGACTCAGCCCCACT |
| | | | GAGGCCTGGTCAAGCCTGGGGGGTC | | CTGTGTCGGAGTCTCCGGGGAAGAC |
| | | | CCTGAGACTCACCTGTGCAGCCTCT | | GGTAACCATCTCCTGCACCGGCAGC |
| | | | GGATTCACCTTCAGTACCTATAGCA | | AGTGGCAGCATTGCCAGCAACTATG |
| | | | TGAACTGGGTCCGCCAGGCTCCAGG | | TGCAGTGGTACCAGCAGCGCCCGGG |
| | | | GAAGGGGCTGGAGTGGGTCTCATCC | | CAGTGCCCCCACCACTGTGATCTAT |
| | | | ATTAGTAGTAGTAATAGTTACATAT | | GAGGATAACCAAAGACCCTCTGGGG |
| | | | ACTACGCAGACTCAGTGAAGGGCCG | | TCCCTGATCGGTTCTCTGGCTCCAT |
| | | | ATTCACCATCTCCAGAGACAACGCC | | CGACAGCTCCTCCAACTCTGCCTCC |
| | | | AAGAACTCACTGTATCTGCAAATGA | | CTCACCATCTCTGGACTGAAGACTG |
| | | | ACAGCCTGAGAGCCGAGGACACGGC | | AGGACGAGGCTGACTACTACTGTCA |
| | | | TGTGTATTACTGTGCGAGAGAGAGG | | GTCTTATGATAGCAGCAATTATTGG |
| | | | GGGTATTACGGTGGTAAAACCCCCC | | GTGTTCGGCGGAGGGACCAAGCTGA |
| | | | CATTTCTTGGGGGCCAGGGAACCCT | | CCGTCCTAG |
| | | | GGTCACCGTCTCCTCAG | | |
| | C875 | 533 | CAGGTGCAGCTGGTGCAGTCTGGGG | 534 | CAGTCTGTGCTGACGCAGCCGCCCT |
| | | | CTGAGGTGAAGCAGCCTGGGGCCTC | | CAGTGTCTGGGGCCCCGGGGCAGGG |
| | | | AGTGAAAATTTCCTGCAAGGCGTCC | | GGTCTCCATCTCCTGCACTGGGAGC |
| | | | GGATACATATTCACCACCTACTTTA | | AGCTCCAACGTCGGGGCAGGTTATG |
| | | | TGCACTGGGTGCGACAGGCCCCTGG | | GTGTACACTGGTACCAACAACTTCC |
| | | | ACAAGGGCTTGAGTGGCTGGGAATA | | AGGAACAACTCCCAAACTCCTCATC |
| | | | ATCGACCCTACTATTAGTGGCGCAA | | TATGATAATAATAGTCGGCCCGCAG |
| | | | GCCTCGCACAGAAGTTCCAGGGCAG | | GGGTCCCTGACCGATTCTCTGGCTC |
| | | | AGTCACCATGACCAGCGACACGTCC | | CAAGTCTGGCACCTCAGCCTCCCTG |
| | | | ACGAGCACAGTTTACATGGAG | | GCCATCGCTGGGCTCCAG |
| | | | ATGAGGAGCCTGAGATCTGACGACA | | CCTGAGGATGAGGCTGATTACTACT |
| | | | CGGCCCTTTATTTTTGTGCTAGAGC | | GCCAGTCCTGGGACAATGGCCTGAG |
| | | | GTCGACTTCGACTAGTAGTTGGAGC | | TGGTTCGGGGGTGGTTTTCGGCGGA |
| | | | GAGGCCCTGTCCTTGGGCTCCTGGG | | GGGACCAAGGTGACCGTCCTAG |
| | | | GCCAGGGAACCCTGGTCACCGTCTC | | |
| | | | CTCA | | |
| | C876 | 535 | GAGGTGCAGCTGGTGGAGTCTGGAG | 536 | GAAATAGTGATGACGCAGTCTCCAA |
| | | | GAGGCTTGATCCAGCCTGGGGGGTC | | CCACCCTGTCTGTGTCTCCAGGGGA |
| | | | CCTGAGACTCTCCTGTGCGGCCTCT | | AAGAGCCACCCTCTCCTGCAGGGCC |
| | | | GAATTTGTCATCAGCAGGAACTACA | | AGTCAGAGTCTTAGTAGCAACTTAG |
| | | | TGAGTTGGGTCCGCCAGGCTCCAAA | | CCTGGTACCAGCAGAAACCTGGCCA |
| | | | GAAGGGGCTGGAGTGGGTCTCAGTT | | GGCTCCCAGGCTCCTCATCTTTGGT |
| | | | CTTTATAGTGGTGGTAGCACATTCT | | GTATCCACCAGGGCCACTGGTATCC |
| | | | ACGCTGACTCCGTAAAGGGCCGATT | | CAGCCAGGTTCAGTGGCAGTGGGTC |
| | | | CACCATCTCCAGAGACGATTCCAGG | | TGGGACAGAGTTCACTCTCACCATC |
| | | | AATATGTTGTATCTTCAAATGAACA | | AGCAGCCTGCAGTCTGAAGATTTTG |
| | | | GCCTGAGAGCCGAAGACACGGCCGT | | CAGTTTACTACTGTCAGCAGTACTA |
| | | | CTATTATTGTGTTAGAGATTTTGGA | | TAGTGGGCCTCGGACGTTCGGCCAA |
| | | | GAGTTCTACTTTGACTACTGGGGCC | | GGGACCAAGGTGGAGATCAAAC |
| | | | AGGGAGTCCTGGTCACCGTCTCCTC | | |
| | | | AG | | |
| | C877 | 537 | GAGGTGCAGCTGGTGGAGTCTGGAG | 538 | GACATCCAGTTGACCCAGTCTCCAT |
| | | | GAGGCTTGATCCCGCCTGGGGGGTC | | CCTTCCTGTCTGCATCTGTAGGAGA |
| | | | CCTGAGACTCTCCTGTGCAGCCTCA | | CAGAGTCACCATCACTTGCCGGGCC |
| | | | GGGATCATCGTCAGTCGCAACTACA | | AGTCAGGGCATTAGCAATTATTTAG |
| | | | TGAGCTGGGTCCGCCAGACTCCAGG | | CCTGGTATCAGCAAAAACCAGGGAA |
| | | | GAAGGGGCTGGAGTGGGTCTCAGTT | | AGCCCCTAAGCTCCTGATCTATGCT |
| | | | ATGTATGCCGGTGGTACCAAAGAGT | | GCATCCACTTTGCAGAGTGGGGTCC |
| | | | ACGCAGACTCCGTGAAGGGCCGATT | | CATCAAGGTTCAGCGGCAGTGGATC |
| | | | CATCATCTCCAGAGACGATTCCAAC | | TGGGACAGAATTCACTCTCACAATC |
| | | | AACACTCTCTATCTTCAAATGAATA | | AGCAGCCTGCAGCCTGAAGATTTTG |
| | | | GCCTGAGAGCCGAGGACACGGCCGT | | CAACTTATTACTGTCAACTGCTTAA |
| | | | GTATTACTGTGCGAGAGATCTGATT | | TAGTTACCCCATGTGCAGTTTTGGC |
| | | | GTCCTTGGGGTGGACGTCTGGGGCC | | CAGGGGACCAAGCTGGAGATCAAAC |
| | | | AAGGGACCACGGTCACCGTCTCCTC | | |
| | | | A | | |
| | C878 | 539 | GAGGTGCAGCTGGTGGAGTCTGGGG | 540 | GACATCCAGATGACCCAGTCTCCAT |
| | | | GAGGCTTGGTCCAGCCTGGGGGGTC | | CCTCCCTGTCTGCATCTGTGGGAGA |
| | | | CCTGAGACTTTCCTGTTCAGTCTCA | | CAGAGTCACCATCACTTGCCGGGCA |
| | | | GGCTTCACCTTCAGTAACTTTGCTA | | AGTCAGAGCATTAGCAGCTTTTTAA |
| | | | TGCACTGGGTCCGCCAGGCTCCAGG | | ATTGGTATCAGCAGAAACCAGGGAA |
| | | | GAAGGGACTGGAATTTGTTTCAGGT | | AGCCCCTAAGCTCCTGATCTATGCT |
| | | | GTAAGTAGTGATGGGGATATCACAG | | GCATCCAGTTTGCAAAGTGGGGTCC |
| | | | ACTACGCAGACTCCGTGAAGGGCAG | | CATCGAGGTTCAGTGGCCGTGGATC |
| | | | ATTCACCATCTCCAGAGACAATTCC | | TGGGGCAGATTTCACTCTCACCATC |
| | | | AAGAACACTCTATATCTTCAAATGA | | ACCAGTCTGCAACCTGAAGATTTTG |
| | | | GCAGTCTGAGACCTGAGGACACGGC | | CAACTTACTTCTGTCAACAGAGTTA |
| | | | TGTGTATTATTGTGTGAAGGATAAG | | CAGTTCCCACCTCACTTTCGGCCCT |
| | | | GAGCATTCAACTATGGTTACTATCT | | GGGACCAAAGTGGATATCAAAC |
| | | | TTGACTTTTGGGGCCAGGGAACCCT | | |
| | | | GGTCACCGTCTCCTCAG | | |
| | C879 | 541 | CAGGTGCAGCTGCAGGAGTCGGGCC | 542 | AATTTTATGCTGACTCAGCCCCACT |
| | | | CAGGGCTGGTGAAGCCCTCACAGAC | | CTGTGTCGGAGTCTCCGGGGAAGAC |
| | | | CCTGTCCCTCACTTGCGGTGTCTCT | | GGTGACCATCTCCTGCACCGCCTCC |
| | | | GGTGACTCCATCAGTAGTGGTGGTC | | AGTGGCAACATTGTCAACAACTATG |
| | | | ATTTCTGGAGCTGGGTCCGGCAGCA | | TGCAGTGGTACCAGCAGCGCCCGGG |
| | | | CCCAGGGACGGGCCTGGAGTGGATT | | CAGTGCCCCCATCATTGTGATCTAT |
| | | | GCCTACAGCCCT | | GAAGATGCCCAAAG |
| | | | TTCAGTGGGACCACCTACTACAACC | | ACCCTCTGGGGTCCCTGATCGGTTC |
| | | | CGTCCCTCAAGAGTCGAGTGACCCT | | TCTGGCTCCATCGACACCTCCTCCA |
| | | | TTCAGTAGACACGTCGAAGAACCAG | | ATTCTGCCTCCCTCACCATCTCTGG |
| | | | TTTTTCCTGAGCTTGACTTCTGTAA | | ACTGAAGACTGAGGACGAGGCTGAC |
| | | | CTGACGCGGACACGGCCGTCTATTT | | TACTACTGTCAGTCTTATGAGATCG |
| | | | CTGTGCGAGAGTTAAGGGGTGGCTG | | ACAGTCATGTCGTCTTCGGCGGTGG |
| | | | AGGGGCTACTTTGACCACTGGGGCC | | GACCAGACTGACCGTCCT |
| | | | AGGGAGTCCTGGTCACCGTCTCCTC | | |
| | | | AG | | |
| | C880 | 543 | CAGGTGCAGCTACAGCAGTGGGGCG | 544 | GAAATTGTGTTGACGCAGTCTCCAG |
| | | | CAGGACTGTTGAAGCCTTCGGAGAC | | GCACCCTGTCTTTGTCTCCAGGGGA |
| | | | CCTGTCCCTCACCTGCGCTGTTTAT | | AAGAGCCACCCTCTCCTGCAGGGCC |
| | | | GGTGGGTCCTTCAGTGATTACTACT | | AGTCAGAGTGTAAGTAGCGCCTACT |
| | | | GGAGTTGGATCCGCCAGCCCCCAGG | | TAGCCTGGTACCAGCAAAAACCTGG |
| | | | GAAGGGCCTGGAGTGGATTGGGGAA | | CCAGGCTCCCAGGCTCCTCATCTAT |
| | | | AACAATCATAGTGGAAAAACCAACT | | GGAGCTTCCAGCAGGGCCACTGGCA |
| | | | ACAACCCGTCCCTCGAGAATCGAGT | | TCCCAGACAGGTTCAGTGGCAGTGG |
| | | | CACCATATCAGTGGACACGTCCAAG | | GTCTGGGACAGACTTCACTCTCACC |
| | | | AATCAGTTCTCCCTGAAATTGACCT | | ATCAGCAGACTGGAGCCTGAAGATT |
| | | | CTGTGACCGCCGCGGACACGGCTGT | | TTGCAGTGTATTTCTGTCAGCAGTA |
| | | | GTATTACTGTGCGAGAGAGAGTGGG | | TGCTTATACAATCTGGACGTTCGGC |
| | | | AGCTACGGCACCTTTGACTACTGGG | | CAAGGGACCAAGGTGGAAATCAAAC |
| | | | GCCAGGGAACCCTGGTCACCGTCTC | | |
| | | | CTCAG | | |
| | C881 | 545 | GAGGTGCAGCTGGTGGAGTCTGGAG | 546 | CAGTCTGCCCTGACTCAGCCTGCCT |
| | | | GAGGCTTGATCCAGCCTGGGGGGTC | | CCGTCTCTGGGTCTCCTGGACAGTC |
| | | | CCTGAGGCTCTCATGTGCAGTCTCT | | GATCACCATCTCCTGCATTGGAACC |
| | | | GGCGTCGCCGTCAGTACCAACTACA | | AGCAGTGATTTTGAAAATTATAACC |
| | | | TGAGCTGGGTCCGCCAGGCTCCAGG | | TTGTCTCCTGGTACCAACAACACCC |
| | | | GCAGGGACTGGAGTGGGTCTCAACT | | AGGCAAAGCCCCCAAAGTCATGATT |
| | | | ATTTATAGCGGTGACACCACGTACT | | TATGAGGACACTAAGCGGCCCTCAG |
| | | | ACTCAGACTCCGTGAAGGGCCGATT | | GGGTTTCTAATCGCTTCTCTGGTTC |
| | | | CACCATCTCCAGAGACAATTCCAAG | | CAAGTCTGCCAACACGGCCTCCCTG |
| | | | AACACTTTCTATCTTCAAATGAACA | | ACAATCTCTGGGCTCCAGGCTGAGG |
| | | | GCCTGAGAGTCCCTGACACGGCCGT | | ACGAGGCTGAATATTACTGCTGCTC |
| | | | GTATTACTGTGCGAGACTGGGGGGA | | ATATGCAGGTGCCAGCACTTGGGTG |
| | | | GTATTTAATGGATTCAACGGATCCT | | TTCGGCGGAGGGACCAGGGTGACCG |
| | | | TTGATTATTGGGGCCAGGGAACCCT | | TCGTAG |
| | | | GGTCACCGTCTCCT | | |
| | C882 | 547 | CAGGTGCAGCTGGTGGAGTCTGGGG | 548 | GATGTTGTGATGACTCAGTCTCCAC |
| | | | GAGGCGTGGTCCAGCCTGGGAGGTC | | TCTCCCTGCCCGTCACCCTTGGACA |
| | | | CCTGAGACTCTCCTGTGCAGCGTCT | | GCCGGCCTCCATCTCCTGCAACTCT |
| | | | GGATTCACTTTCATTAGATACAACA | | AGTCAAAGCCTCGTACACACTGATG |
| | | | TGCACTGGGTCCGCCAGGCTCCAGG | | GAAACACCTACTTGAATTGGTTTCA |
| | | | CAAGGGGCTGGAGTGGGTGGCAGTT | | GCAGAGGCCAGGCCAATCTCCAAGG |
| | | | ATATGGTATGATGGAAGTAATAAAT | | CGCCTCATTTATAAGGTTTCTAACC |
| | | | ACTATGCGGACTCCGTGAAGGGCCG | | GGGACTCTGGGGTCCCAGACAGATT |
| | | | ATTCACCATCTCCAGAGACAATTCC | | CAGCGGCAGTGGGTCCGACACTGAT |
| | | | AAGAATACCTTGTATCTGCAAATGA | | TTCACACTGCAAATCAGCAGGGTGG |
| | | | ACAGCCTGAGAGCCGAGGACACGGC | | AGGCTGACGATGTTGGCGTTTATTA |
| | | | TGTGTATTATTGTGCGAGAGATCCT | | CTGCATGCAAGGTTCACACTGGCCG |
| | | | ATGATAGTAGTGGTCGAAATGGACT | | TACACTTTTGGCCAGGGGACCAAGC |
| | | | ACTGGGGCCAGGGAACCCTGGTCAC | | TGGAGATCAAAC |
| | | | CGTCTCCTCAG | | |
| | C884 | 549 | CAGGTGCAGCTACAGCAGTGGGGCG | 550 | GAAATTGTGTTGACGCAGTCTCCAG |
| | | | CAGGGCTGCTGAAGCCTTCGGAGAC | | GCACCCTGTCTTTGTCTCCAGGGGA |
| | | | CCTGTCCCTCACCTGCGTTGTCTAT | | AAGAGCCACCCTCTCCTGCAGGGCC |
| | | | GGTGGGTCCTTCAGTGCTTACTACT | | AGTCAGAGTGTTAGCAGCACCTACT |
| | | | GGAGCTGGATCCGCCAGCCCCC | | TAGCCTGGTACCAGCAGAAACCT |
| | | | AGGGAAGGGGCTGGAATGGATTGGG | | GGCCAGGCTCCCAGGCTCCTCATCT |
| | | | GAAATCAATCATAGTGGAAGCACCA | | ATGGTGCGTCCAGCAGGGCCACTGG |
| | | | ACTACAAGTCGTCCCTCCAGAGTCG | | CATCCCAGACAGGTTCAGTGGCAGT |
| | | | AGTCACCATTTCAGTAGACACGTCC | | GGGTCTGGGACAGACTTCACTCTCA |
| | | | AAGAACCAGTTCTCCCTGAAGCTGA | | CCATCAGCAGACTGGAGCCTGAAGA |
| | | | GCTCTGTGACCGCCGCGGACACGGC | | TTTTGCAGTGTATTACTGTCAGCAG |
| | | | TGTCTATTATTGTGCGAGAGAGACT | | TATGCTTTTTCGGTCTGGACGTTCG |
| | | | GGGACCTACGGCACGTTTGACCACT | | GCCAAGGGACCAAGGTGGAAATCAA |
| | | | GGGGCCAGGGAACTCTGGTCACCGT | | |
| | | | CTCCTCAG | | |
| | C885 | 551 | CAGGTGCAGCTGCAGGAGTCGGGCC | 552 | AATTTTATGCTGACTCAGTCCCACT |
| | | | CAGGACTTGTGAAGCCTTCACAGAC | | CTGTGTCGGAGTCTCCGGGGAAGAC |
| | | | CCTGTCCCTCACCTGCGCTGTCTCT | | GGTAACCATCTCCTGCACCGGCAGC |
| | | | GGTGACTCCATCCGTAGTGGTGGTT | | AGTGGCAACATTGTCAACAACTATG |
| | | | ACTACTGGAGCTGGGTCCGGCAGCA | | TGCAGTGGTATCAGCAGCGCCCGGG |
| | | | CCCAGGGAGGGGCCTGGAGTGGATT | | CAGTGCCCCCATCATTGTGATCTAT |
| | | | GGCTACATCTATTTCAGTGGGACCA | | GAGGATACCCAAAGACCCTCTGGGG |
| | | | CCTACTACAACCCGTCCCTCAAGAG | | TCCCTGATCGGTTCTCTGGCTCCAT |
| | | | TCGAGTGACCATTTCAGTAGACACG | | CGACACCTCCTCCAACTCTGCCTCC |
| | | | TCTGAGAAGCAGTTTTCCCTGAAGT | | CTCACCATCTCTGGGCTGAAGACTG |
| | | | TGACTTCTGTAACTGACGCGGACAC | | AGGACGAGGCTGACTACTACTGTCA |
| | | | GGCCGTGTATTTCTGTGCGAGAGTT | | GTCTTATGATAGCGGCAGTCATGTC |
| | | | AAGGGGTGGCTAAGGGGCTACTTTG | | GTCTTCGGCGGTGGGACCAAACTGA |
| | | | ACTACTGGGGCCAGGGAGCCCTGGT | | CCGTCCT |
| | | | CACCGTCTCCTCAG | | |
| | C886 | 553 | GAGGTGCAGCTGGTGGAGTCTGGGG | 554 | GACATCCAGATGACCCAGTCTCCAT |
| | | | GAGACTTGGTACAGCCTGGGGGGTC | | CCTCCCTGTCTGCATCTGTAGGGGA |
| | | | CCTGAGACTCTCCTGTGCAGCCTCT | | CAGAGTCTCCATCACTTGCCGGGCA |
| | | | GGATTCAGCGTCACAACCAATGCCA | | AGTCAGACCATTAATACTCATTTAA |
| | | | TGGCCTGGGTCCGCCAGGCTCCAGG | | GTTGGTATCTGCAGAAACCAGGCGA |
| | | | GAAGGGGCTGGAGTGGATTTCATAT | | AGCCCCTAGGCTCCTGGTCTATGCT |
| | | | ATTAATATAGGTAGTGCTAATATAC | | GCATCCACTTTACACAGTGGGGTCC |
| | | | AGTATGCTGACTCTGTGAAGGGCCG | | CATCAAGGTTCAGTGGCAGTGGATC |
| | | | ATTCACCATCTCCAGAGACAACGCC | | TGGGACAGATTTCACTCTCACCATC |
| | | | AAGAACTCACTGTATCTGCAAATGA | | AGTAGTCTGCAACCTGAAGACTTTG |
| | | | ATAGCCTGAGAGACGAGGACACGGC | | CAACTTTCTACTGTCAACAGACTTA |
| | | | TGTCTATTACTGTGCGAGAGGTGAT | | CAGATTCCCCCTCACTTTCGGCGGA |
| | | | TGTACTAGCAGCAGTTGTTATAGTT | | GGGACCAAGGTGGAAATCAAAC |
| | | | TGGACTACTGGGGCCAGGGAGCCCT | | |
| | | | GGTCACCGTCTCCTCAG | | |
| | C887 | 555 | GAGGTGCAGCTGGTGGAGTCTGGGG | 556 | GACATCCAGATGACCCAGTCTCCAT |
| | | | GAGACTTGGTACAGCCTGGGGGGTC | | CCTCCCTGTCTGCATCTGTAGGAGA |
| | | | CCTGAGACTCTCCTGTGCAGCCTCT | | CAGAGTCACCATCACTTGCCGGGCA |
| | | | GGATTCACCTTCACTACCTATAGCA | | AGTCAGAGCATTACCAGCTATTTAA |
| | | | TGAGCTGGGTCCGCCAGGCTCCAGG | | GCTGGTATCTGCAGAAACCAGGGGA |
| | | | GAAGGGGCTGGAGTGGATTTCATAT | | AGCCCCTAAGCTCCTGATCTATGCT |
| | | | ATTAACAGTGGTAGTGCAAACATAC | | GCATCCATTTTACAAAGTGGGGTCC |
| | | | ACTACGCAGACTCTGTGAAGGGCCG | | CATCAAGGTTCGGTGGCAATGGATC |
| | | | ATTCACCGTCTCCAGAGACAATGCC | | TGGGACAGATTTCACTCTCACCATC |
| | | | AAGAACTCACTGTATCTGCAAATGA | | AGCAGTCTGCAACCTGAAGATTTTG |
| | | | ATAGCCTGAGAGACGAGGACACGGC | | CAACTTTCTACTGTCAACAGACTTA |
| | | | TGTTTATTATTGTGCGAGAGGTGAT | | CCGTTCCCCCCTCACTTTCGGCGGG |
| | | | TGTCTTAGCAGCAGTTGTTATAGTT | | GGGACCAAGGTGGAGATCAAAC |
| | | | TGGACTACTGGGGCCAGGGAGCCCT | | |
| | | | GGTCACCGTCTCCTCAG | | |
| | C888 | 557 | GAGGTGCAGCTGGTGGAGTCTGGGG | 558 | CAGTCTGCCCTGACTCAGCCTGCCT |
| | | | GAGGCTTGGTCCAGCCTGGGGGGTC | | CCGTGTCTGGGTCTCCTGGACAGTC |
| | | | CCTGAGACTCTCCTGTGCAGCCTCT | | GATCACCATCTCCTGCACTGGAACC |
| | | | GGATTC | | AGCAGTG |
| | | | ACCGTCAGTAGCAACTACATGAGCT | | ACGTTGGTGGTTATAACTATGTCTC |
| | | | GGGTCCGCCAGGCTCCAGGGAAGGG | | CTGGTACCAACAACACCCAGGCAAA |
| | | | GCTGGAGTGGGTCTCAGTTATTTAT | | GCCCCCAAACTCATGATTTATGATG |
| | | | AGCGGTGGTAGCGCATACTACGCAG | | TCAGTAATCGGCCCTCAGGGGTTTC |
| | | | ACTCCGTGAAGGGCAGATTCACCAT | | TAATCGCTTCTCTGGCTCCAAGTCT |
| | | | CTCCAGAGACAATTCCAAGAACACG | | GGCAACACGGCCTCCCTGACCATCT |
| | | | CTGTATCTTCAAATGAACAGCCTGA | | CTGGGCTCCAGGCTGAGGACGAGGC |
| | | | GAGCCGAGGACACGGCTGTGTATTA | | TGATTATTACTGCAGCTCATATACA |
| | | | CTGTGCGAGAGATCTTAGGGATCAA | | AGCAGCAGCTCCTGGGTGTTCGGCG |
| | | | GACGGGTACAGCTATGGGGCGTTTG | | GAGGGACCAAGCTGACCGTCCTAG |
| | | | ACTACTGGGGCCAGGGAACCCTGGT | | |
| | | | CACCGTCTCCTCAG | | |
| | C889 | 559 | GAGGTGCAGCTGGTGGAGTCTGGGG | 560 | CAGTCTGCCCTGACTCAGCCTGCCT |
| | | | GAGGCTTGGTCCAGCCTGGGGGGTC | | CCGTGTCTGGGTCTCCTGGACAGTC |
| | | | CCTGAGACTCTCCTGTGCAGTCTCT | | GATCACCATCTCCTGTTCTGGAACC |
| | | | GGATTCACCGTCAGTAGTAATTACA | | AGCAGTGACGTTGGCGCTCATAACT |
| | | | TGACCTGGGTCCGCCAGGCTCCAGG | | ATGTCTCCTGGTATCAGCAATATCC |
| | | | GAAGGGGCTGGAGTGGGTCTCACTT | | AGGCAAAGCCCCCAAACTCATGATT |
| | | | ATTTATAGCGGCACTAGTGCATTTT | | TTTGATGTCACTGATCGTCCCTCAG |
| | | | ACGCAGACTCCGTGAAGGGCAGATT | | GGGTTTCCAATCGCTTCTCTGGTTC |
| | | | CACCATCTCCAGAGACAATTCCAAG | | CAAGTCTGGCAACACGGCCTCCCTG |
| | | | AACACGCTGTATCTTCAGATGAGCA | | ACCATCTCTGGGCTCCAGGCTGAGG |
| | | | GTCTGAGAGTCAATGACACGGCTAT | | ACGAGGCTGATTATTACTGCACTTC |
| | | | ATATTATTGTGCGAGAGACCTTAGG | | ATATACAACCAACAGGTCCTGGGTG |
| | | | AAAGATGACGGGTACAGCTATGGGG | | TTCGGCGGCGGGACCAAGGTGACCG |
| | | | CGTTTGACTACTGGGGCCAGGGAAC | | TCCTAG |
| | | | CCTGGTCACCGTCTCCTCAG | | |
| | C890 | 561 | CAGGTGCAGCTGGTGCAGTCTGGGG | 562 | GAAATTGTGTTGACGCAGTCTCCAG |
| | | | CTGAGGTGAAGAAGCCTGGGTCCTC | | GCACCCTGTCTTTGTCTCCAGGGGA |
| | | | GGTGAAGGCCTCCTGCAAGGCTTCT | | AAGAGCCACCCTCTCCTGCAGGGCC |
| | | | GGAGGCACGTTCAGCACCTATACTA | | AGTCAGAGTGTTAGCAGCAGCTACT |
| | | | TCAGCTGGGTGCGACAGGCCCCTGG | | TAGCCTGGTACCAGCAGAAACCTGG |
| | | | ACACGGGCTTGAGTGGATGGGACGG | | CCAGGCTCCCAGGCTCCTCATCTAT |
| | | | ATCATTCCTATATTTGGTACAACAA | | GGTGCATCCAGCAGGGCCACTGGCA |
| | | | AGTACGCACAGAAGTTCCAGGGCAG | | TCCCAGACAGGTTCAGTGGCAGTGG |
| | | | AGTCACGATTACCGCGGACGAATCC | | GTCTGGGACAGACTTCACTCTCACC |
| | | | ACGACCACAGCCTACCTGGAGCTGA | | ATCAGCAGACTGGAGCCTGAAGATT |
| | | | GCAGCCTGAGATCTGAGGACACGGC | | TTGCAGTGTATTACTGTCAGCAGTA |
| | | | CGTGTATTACTGTACGATCAACACT | | TGGTAGCTCACTTTACACTTTTGGC |
| | | | CAGTGGGACCTAGTCCCAAGGTGGG | | CAGGGGACCAAGCTGGAGATCAAAC |
| | | | GCCAGGGAACCCTGGTCACCGTCTC | | |
| | | | CTCAG | | |
| | C891 | 563 | GAGGTGCAGCTGGTGGAGTCTGGGG | 564 | AATTTTATGCTGACTCAGCCCCACT |
| | | | GAGGCTTGGTAAAGCCTGGGGGGTC | | CTGTGTCGGAGTCTCCGGGGAAGAC |
| | | | CCTTAGACTCTCCTGTGCAGTCTCT | | GGTAACCATCTCCTGCACCGGCAGC |
| | | | GGATTCACTTTCAGTAACGTCTGGA | | AGTGGCAGCATTGCCAGCAACTATG |
| | | | TGAGCTGGGTCCGCCAGGCTCCAGG | | TGCAGTGGTACCAGCAGCGCCCGGG |
| | | | GAAGGGGCTGGAGTGGGTTGGCCGT | | CAGTGCCCCCACCACTGTGATCTAT |
| | | | ATTAAAAGCAAAACTGATGGTGGGA | | GAGGATAACCAAAGACCCTCTGGGG |
| | | | CAACAGACTACGCTGCACCCGTGAA | | TCCCTGATCGGTTCTCTGGCTCCAT |
| | | | AGGCAGATTCACCATCTCAAGAGAT | | CGACAGCTCCTCCAACTCTGCCTCC |
| | | | GATTCAAAAAACACGCTGTATCTGC | | CTCACCATCTCTGGACTGAAGACTG |
| | | | AAATGAACAGCCTGAAAACCGAGGA | | AGGACGAGGCTGACTACTACTGTCA |
| | | | CACAGCCGTGTATTACTGTACCTCA | | GTCTTATGATAGCAGCCTTAATTGG |
| | | | CAGCTATGGTTACGGGGCCCCGGTG | | GTGTTCGGCGGAGGGACCAAGCTGA |
| | | | ACTAC-TGGGGCCAGGGAACCCTGGTCACCG | | CCGTCCTAG |
| | | | TCTCCTCAG | | |
| | C892 | 565 | GAGGTGCAGCTGGTGGAGTCTGGGG | 566 | AATTTTATGCTGACTCAGCCCCACT |
| | | | GAGGCTTGGTGAAGCCTGGGGGGTC | | CTGTGTCGGAGTCTCCGGGGAAGAC |
| | | | CCTTAAAGTCTCCTGTACAGCCTCT | | GGTAACCATCTCCTGCACCGGCAGC |
| | | | GGATTCACTTTCACTGACGCCTGGA | | AGTGGCAGCATTGCCAGCAACTATG |
| | | | TGAGCTGGGTCCGCCAGGCTCCAGG | | TGCACTGGTACCAGCAGCGCCCGGG |
| | | | GAAGGGGCTGGAGTGGGTTGGCCGT | | CGGTGCCCCCACGACTGTGATCTAT |
| | | | ATTAAAAGCAGAGCTTATGGTGGGA | | GAGGATAACCAAAGACCCTCTGGGG |
| | | | CGACAGACTACGGTGCACCCGTGCA | | TCCCTGATCGGTTCTCTGGCTCCAT |
| | | | AGGCAGATTCACCATCTCAAGAGAT | | CGACATCTCCTCCAACTCTGCCTCC |
| | | | GATTCAATAAACACTCTTTATCTGC | | CTCACCATCTCTGGACTGAAGACTG |
| | | | AAATGAACAGCCTGACAGCCGAGGA | | AGGACGAGGGTGACTACTACTGTCA |
| | | | CACAGCCGTTTATTACTGTACCTCA | | GTCTTATGATAGTGGTGTTAATTGG |
| | | | CAACTATGGTTACGGGGCCCCGGTG | | GTGTTCGGCGGAGGGACCAAGCTGA |
| | | | ACTACTGGGGCCAGGGAACCCTGGT | | CCGTCCTAG |
| | | | CACCGTCTCCTCAG | | |
| | C893 | 567 | GAGGTGCAGCTGGTGCAGTCTGGAG | 568 | GAAATTGTGTTGACACAGTCTCCAG |
| | | | CAGAGGTGAAAAAGCCCGGGGAGTC | | CCACCCTGTCTTTGTCTCCAGGAGA |
| | | | TCTGAAGATCTCCTGTAAGGGTTCT | | AAGAGCCACCCTCTCCTGCAGGGCC |
| | | | GGTTACTACTTTACCAGACAGTGGA | | AGTCAGAGTGTTAGCAGCTACTTAG |
| | | | TCGGCTGGGTGCGCCAGATGCCCGG | | CCTGGTACCAACAGAGACCTGGCCG |
| | | | GAAAGGCCTGGAGTGGATGGGGATC | | GGCTCCCAGGCTCCTCATCTATGAT |
| | | | ATCTATCCTGGTGACTCTGATACCA | | GCATCCAACAGGGCCACTGGCATCC |
| | | | GATACAGTCCGTCCTTCCAAGGCCA | | CAGGCAGGTTCAGTGGCAGTGGGTC |
| | | | GGTCACCATCTCAGCCGACAAGTCC | | TGGGACAGACTTCTCTCTCACCATC |
| | | | ATCAGCACCGCCTATTTGCAGTGGA | | AGCAGCCTAGAGCCTGAAGATTTTG |
| | | | GCAGCCTGAAGGCCTCGGACACCGC | | CAGTTTATTACTGTCAGCAGCGTAG |
| | | | CATGTATTACTGTGCGAGGGGGGGT | | CAGCTGGCCCCTCACCTTCGGCCAA |
| | | | TGGGACCCCGCCGAGTATAGCAGTT | | GGGACACGACTGGAGATTAAAC |
| | | | CCGGGGGCGGGGGTCTCGATGCTTT | | |
| | | | TGATATCTGGGGCCAAGGGACAATG | | |
| | | | GTCACCGTCTCTTCAG | | |
| | C894 | 569 | GAGGTGCAGCTGGTGCAGTCCGGAG | 570 | GAAATTGTGTTGACGCAGTCTCCAG |
| | | | CAGAGGTGAAAAAGCCCGGGGAGTC | | GCACCCTGTCTTTGTCTCCAGGGGA |
| | | | TCTGAGGATCTCCTGTAAGGGTTCT | | AAGAGCCACCCTCTCCTGCACGGCC |
| | | | GGATACAGCTTTACCGGCTACTGGA | | GATCAGAGTGTTCCCAATAGTTACT |
| | | | TCAGCTGGGTGCGCCAGATGCCCGG | | TAGCCTGGTACCAACACAAACCTGG |
| | | | GAAAGGCCTGGAGTGGATGGGGAGA | | CCAGGCTCCCAGGCTCCTCATCTAT |
| | | | ATTGATCCCAGTGACTCTTATACCA | | GGTGCATCCAGCAGGGCCACTGGCA |
| | | | ACTACAGCCCGTCCTTCGAAGGCCA | | TCCCAGACAGGTTCAGTGGCAGTGG |
| | | | CGTCACCTTCTCAGCTGACACGGCC | | GTCTGGCATAGACTTCACTCTCACC |
| | | | CTCAGCACCGCCTACCTGCAGTGGA | | ATCAGCAGACTGGAGCCTGAAGATT |
| | | | GCAGCCTGCAGGCCTCGGACACCGC | | TTGCAGTGTATTACTGTCAGCAGTA |
| | | | CATATATTTCTGTGGGAGAATTGCA | | TGGTAGCTTACTTCTCACTTTCGGC |
| | | | CCTCCTGGAAGGGGGAGTTATTACC | | GGAGGGACCAAGGTGGAAATCAAAC |
| | | | CCACCCAAAACTACATGGACGTCTG | | |
| | | | GGGCAAAGGGACCACGGTCACCGTC | | |
| | | | TCCTCA | | |
| | C895 | 571 | CAGGTGCAGCTGGTGCAGTCTGGGG | 572 | GAAATTGTGTTGACACAGTCTCCAG |
| | | | CTGAGGTGAAGAAGCCTGGGTCCTC | | CCACCCTGTCTTTGTCTCCAGGGGA |
| | | | GGTGAAGGTCTCCTGCAAGGCTTCT | | AAGGGCCACCCTCTCCTGCAGGGCC |
| | | | GGAGGCACCTTCACCAGCTATGCTT | | AGTCAGAGTGTTGGCAGCTACTTAG |
| | | | TCAGCTGGGTGCGACAGGCCCCTGG | | CCTGGTACCAACAGAAACCTGGCCA |
| | | | ACAAGGGCTTGAGTGGATGGGAGGG | | GGCTCCCAGGCTCCTCATCTATGAT |
| | | | ATTATCCCTATCTTTGGTACAACAA | | GCATCCAACAGGGCCACTGGCATCC |
| | | | ACTACGCACAGAAGTTCCAGGGCAG | | CAGCCAGGTTCAGTGGCAGTGGGTC |
| | | | AGTCACGATTACCGCGGACGAATCC | | TGGGACAGACTTCACTCTCACCATC |
| | | | ACGAGCACTGCCTACATGGA | | AGCAGCCTAGAGCCTGAAGA |
| | | | GCTGAGCAGCCTGAGATCTGAGGAC | | TTTTGCATTTTATTTCTGTCAGCAG |
| | | | ACGGCCGTGTATTACTGTGCGAGAC | | CGTAACAGCTGGCCTCCGGAGTACT |
| | | | CGGAGGGATGTGGTAGTAGAACCAG | | CTTTTGGCCAGGGGACCAAGCTGGA |
| | | | CTGCACACCGGGGGCTTATTATTAC | | GATCAAAC |
| | | | GGTATGGACGTCTGGGGCCAAGGGA | | |
| | | | CCACGGTCACCGTCTCCTCA | | |
| | C896 | 573 | CAGGTGCAGCTGGTGGAGTCTGGGG | 574 | GACATCCAGATGACCCAGTCTCCAT |
| | | | GAGGCGTGGTCCAGCCTGGGAGGTC | | CCTCCCTGTCTGCATCTGTAGGAGA |
| | | | CCTGAAACTCTCCTGTGCAGCCTCT | | CAGAGTCACCATCACTTGCCGGGCA |
| | | | GGATTCACCTTCAAAACTTATGGCA | | AGTCAGACCATTAGTAGCTATTTAA |
| | | | TGCACTGGGTCCGCCAGGCTCCAGG | | ATTGGTATCAACAAAAATCAGGGAA |
| | | | CAAGGGGCTGGAATGGGTGGCAGTT | | AGCCCCTGAGCTCCTGGTCTATGAT |
| | | | ATATCATATGATGGAACTAATGACT | | GCATCCAACTTGGAAAGTGGGGTCC |
| | | | ACTATGCAGACTCCGTGAAGGGCCG | | CATCAAGGTTCAGTGGCAGTGGATC |
| | | | ATTCACCGTCTCCAGAGACAACTCC | | TGGGACAGATTTCACTCTCACCATC |
| | | | AAGAACACGCTGTATCTGCAAATGA | | AGCAGTCTGCAACCTGAAGATTTTG |
| | | | ACAGCCCGAGAACTGAAGACACGGC | | CAACTTACTACTGTCAACAGAGTTA |
| | | | TGTGTATTACTGTGCGAAAGCGGGG | | CAGTTTCGGCCCTGGGACCAAAGTG |
| | | | GGCCCATATTACTATGATACTAGCG | | GATATCAAAC |
| | | | GTTCTTTCTGGTACTTTGACTACTG | | |
| | | | GGGCCAGGGAACCCTGGTCACCGTC | | |
| | | | TCCTCAG | | |
| | C897 | 575 | CAGGTGCAGCTGGTGGAGTCTGGGG | 576 | GACATCCAGATGACCCAGTCTCCAT |
| | | | GAGGCGTGGTCCAGCCTGGGAGGTC | | CCTCCCTGTCTGCATCTGTAGGAGA |
| | | | CCTGAGACTTTCCTGTGCAGCCTCT | | CAGAGTCACGATCACTTGCCAGGCG |
| | | | GGATTCATCTTCAGTCACTATGGCA | | AGTCAGGACATTAGAGATAATTTAA |
| | | | TGCACTGGGTCCGCCAGGCTCCAGG | | ATTGGTATCAGCAGAAACCAGGGAA |
| | | | CAAGGGGCTGGAATGGGTGGCAGTT | | AGCCCCTCAGCTCCTGATCTACGAT |
| | | | ATATTATATGATGGAAGCGACCAAT | | GCATCCAATTTGCAACCAGGGGTCC |
| | | | ACTATGCAGACTCCGTGAAGGGCCG | | CATCAAGGTTCAGTGGAAGTGGATC |
| | | | ATTCACCATCTCCAGAGACAACTCC | | TGGGACACATTTTACTTTCACCATC |
| | | | AAGAACACGCTGTTTCTGGAAATGA | | AGCAGACTGCAGCCTGAAGATATTG |
| | | | ACAGCCTGAGACTTGAGGACACGGC | | CAACATATTTCTGTCAACAGTATGC |
| | | | TGTGTATTACTGTGCGAAAGGGGGG | | TAATCTCCCTACCACTTTCGGCCCT |
| | | | GGCCAATATTGTAGTCATGGTAATT | | GGGACCAAAGTGGATATCAAAC |
| | | | GCTACCTTAACTACTTTGACTACTG | | |
| | | | GGGCCAGGGAGCCCTGGTCACCGTC | | |
| | | | TCCTCAG | | |
| | C898 | 577 | CAGGTGCAGCTGGTGCAGTCTGGGG | 578 | GAAATTGTGTTGACGCAGTCTCCAG |
| | | | CTGAGGTGAAGAAGCCTGGGTCCTC | | GCACCCTGTCTTTGTCTCCAGGGGA |
| | | | GGTGAAGGTCTCCTGCAAGGCTTCT | | AAGAGCCACCCTCTCTTGCAGGGCC |
| | | | GGAGGCCCCTTCAGCAGCTATGCCT | | AGTCAGAGTGTTAACAGCGATTACT |
| | | | TCACCTGGGTGCGACAGGCCCCTGG | | TAGCCTGGTATAAGCAGAAACCTGG |
| | | | ACAAGGGCTTGAGTGGATGGGAGGG | | CCAGGCTCCCAGGCTCCTCATCTAT |
| | | | ATCATCGCTACCTTTGGTACAGTAA | | GGTACATCCAGCAGGGCCACTGGCA |
| | | | ACTACGCACAGAAGTTCCAGGGCAG | | TCCCAGACAGGTTCAGTGGCAGTGG |
| | | | AGTCACGATTACCGCGGACGAATTC | | GTCTGGGACAGACTTCACTCTCACC |
| | | | ACGAGTACAGTCAACATGGAGCTGA | | ATCAGCAGACTGGAGCCTGATGATT |
| | | | GCAGCCTGAGATCTGACGACACGGC | | TTGCAGTGTATTACTGTCAACAGTA |
| | | | CGTGTATTACTGTGCGCGGAGGGAT | | TGGTAACTCACCTCGGACGTTCGGC |
| | | | TGTAGTACTACGAGCTGTTATGATG | | CAAGGGACCAAGGTGGAAATCAAAC |
| | | | AGGTGCTTTATCGGCTAGTTGACTG | | |
| | | | GGGTCAGGGAACCCTGGTCACCGTC | | |
| | | | TCCTCAG | | |
| | C899 | 579 | GAGGTGCAGCTGGTGGAGTCCGGGG | 580 | CAGTCTGCCCTGACTCAGCCTCGCT |
| | | | GAGGCTTGGTAAAGCCTGGGGGGTC | | CAGTGTCCGGGTCTCCTGGACAGTC |
| | | | CCTTAGACTCTCCTGTGCAGCCTCT | | AGTCACCATCTCCTGCACTGGAAGC |
| | | | GGATTCACTTTCAGTAACGCCTGGA | | AACAGTGATGTTGGTGGTTATAACT |
| | | | TGAGCTGGGTCCGCCAGGCCCCAGG | | ATGTCTCCTGGTACCAACAACACCC |
| | | | GAAGGGGCTGGAGTGGGTTGGCCGT | | CGGCAAAGCCCCCAAACTCGTGATT |
| | | | ATTAAAAGCAAAACTGATGCTGAGA | | TATGATGTTAGTTTGCGACCCTCTG |
| | | | CGACAGACTACGCTGCACCCGTGAG | | GGGTCCCTGATCGCTTCTCTGGTTC |
| | | | AGGCAGATTCACCATCTCAAGAGAT | | CAAGTCTGGCATCACGGCCTCCCTG |
| | | | AATTCAAAAAATACACTATATTTGG | | ACCATCTCTGGGCTCCAGCCTGAGG |
| | | | AAATGAACAGCCTGAAAACCGAGGA | | ATGAGGCTCATTATTACTGCTGCTC |
| | | | CACAGCCGTGTATTATTGTACCACA | | ATTTGCAGGCACCTACACTCCCTGG |
| | | | GATGCCGATTACTCTGATAGTAGTG | | GTGTTCGGCGGAGGGACCAGGCTGA |
| | | | GTTATTACGTGACCTACTACTTTGA | | CCGTCCTAG |
| | | | ATACTGGGGCCAGGGATCCCTGGTC | | |
| | | | ACCGTCTCCTCAG | | |
| | C900 | 581 | CAGGTGCAGCTGCAGGAGTCGGGCC | 582 | GACATCCAGATGACCCAGTCTCCAT |
| | | | CGGGACTGGTGAAGCCATCGGGGAC | | CCTCCCTGTCTGCATCTGTAGGAGA |
| | | | CCTGTCGCTCACCTGCACTGTCTCT | | CAGAGTCACCATCACTTGCCGGGCG |
| | | | GGTGGCTCCATCAACAGTAGAAACT | | AGTCAGGGCATTAGTAATTCTTTAG |
| | | | GGTGGAGTTGGGTCCGCCAGCCCCC | | CCTGGTATCAGCTGAAACCAGGGAA |
| | | | AGGGAAGGGTCTGGAGTGGATTGGG | | AGCCCCTAAGCTCCTGCTCTATGCT |
| | | | GAAATCTTTCATAGTGGGAGCACCA | | GCATCCACATTGGAAAGTGGGGTCC |
| | | | ACTACAACCCGTCCCTCGAGAGTCG | | CATCCAGGTTCAGTGGCAGTGGATC |
| | | | AGTCGCCATATCCATAGACAAGTCC | | TGGGACGAATTTCACTCTCACCATC |
| | | | CACAACCACTTCTCCCTGAAGCTGA | | AGCAGCCTGCAGCCTGAAGATTTTG |
| | | | CCTCTGTGACCGCCGCGGACACGGC | | CATCCTATTGCTGTCAACATTATTA |
| | | | CGTGTATTATTGTGCGAGGGCTAAT | | TAGCAGCCCTCGGACGTTCGGCCAA |
| | | | GGTATACTTGACTTCTGGGGCCAGG | | GGGACCAAGGTGGAAATCAA |
| | | | GAACCCTGGTCACCGTCTCCTCAG | | |
| | C901 | 583 | CAGGTGCAGCTGGTGGAGTCTGGGG | 584 | GACATCCAGATGACCCAGTCTCCAT |
| | | | GAGGCGTGGTCCAGCCTGGGAGGTC | | CCTCCCTGTCTGCATCTGTAGGAGA |
| | | | CCTGAGAATTGCCTGTGGAGCCTCT | | CAGAGTCACCATCACTTGCCGGGCA |
| | | | GGATTCACGTTCAGTACTTATGACA | | AGTCAGAGCATTAGCACCTATTTAA |
| | | | TGCACTGGGTCCGCCAGGCTCCAGT | | ATTGGTATCAGCAGAAACCAGGGAA |
| | | | CAAGGGGCTGGAGTGGGTGGCAGTT | | AGCCCCTAGCCTCCTCATCTATGCT |
| | | | ATATCACGTGATGGAAGTGGTAAAT | | GCATCCAGTTTATATAGTGGGGTCC |
| | | | TCTATGCAGACTCCGTGAAGGGCCG | | CATCAAGGTTCAGTGGCAGTGGATC |
| | | | ATTCACCATCTCCAGAGACAATTCC | | TGGGACAGATTTCAGTCTCACCATC |
| | | | AAGAAGACGCTGTATCTGCAAATGG | | AGCAGTCTGCAACCTGAAGATTTTG |
| | | | ACAGTCTGAGACCTGAGGACACGGC | | CAACTTACTACTGTCAACAGACTTA |
| | | | TATGTATTATTGTGCGAGAGATTTT | | CACTACCCCCACGTGGACGTTCGGC |
| | | | GAGAGTAGAACCTGGGACCCCCCCA | | CAAGGGACCAAGGTGGAAATCAAAC |
| | | | AATACTATTACGCTTTGGACGTCTG | | |
| | | | GGGCCAAGGGACCACGGTCACCGTC | | |
| | | | TCCTCA | | |
| | C902 | 585 | GAGGTGCAGCTGGTGCAGTCCGGAG | 586 | GACATCCAGTTGACCCAGTCTCCAT |
| | | | CAGAGGTGAAAAAGCCCGGGGAGTC | | CCTTCCTGGCTGCATCTGCAGGAGA |
| | | | TCTGAGGATCTCCTGCAAGGGCTCT | | CAGAGTCACCATCACTTGCCGGGCC |
| | | | GGATACAGCTTTCACACCTACTGGA | | AGTCAGGGCATTAGCAGTTATTTAG |
| | | | TCCACTGGGTGCGCCAGATGCCCGG | | CCTGGTATCAGCAAAAACCGGGGAA |
| | | | GAAAGGCCTGGAGTGGATGGGGAAG | | AGCCCCTAAGGTCCTGATCTATGCT |
| | | | ATTGATCCTAGTGACTCTTATACCA | | GCATCCACTTTGCAAAGTGGGGTCC |
| | | | ACTACAGCCCATCCTTCCAAGGCCA | | CATCAAGGTTCAGCGGCAGTGGATC |
| | | | CGTCACCTTCTCAGCTGACAGGTCC | | TGGGACAGAATTCACTCTCACAATC |
| | | | ATCAGCACTGCCTACTTGCA | | AGCAGCCTGCAGCCTGAAGATT |
| | | | GTGGAGCAGCCTGAAGGCCTCGGAC | | GTGCAACTTATTACTGTCAACAGTT |
| | | | ACCGCCACATACTATTGTGCGAGAC | | TAATAGTGACCCTCTCACTTTCGGC |
| | | | TTTCCTGGAGTCCCCCCACCAGAAC | | GGAGGGACCAAGGTGGAGATCAAAC |
| | | | CACCGACGAAAAAAACTGGTTCGAC | | |
| | | | CCCTGGGGCCAGGGAACCCTGGTCA | | |
| | | | CCGTCTCCTCAG | | |
| COV57 | C952 | 587 | GAGGTGCAGCTGGTGCAGTCTGGAG | 588 | CAGTCTGTGCTGACTCAGCCGCCCT |
| | | | CAGAGGTGAAAAAGCCCGGGGAATC | | CAGTGTCTGGGGCCCCAGGGCAGAG |
| | | | TCTGACGATCTCCTGTAAGGATTCT | | GGTCACCATCTCCTGCACTGGGAGC |
| | | | GGAAACAGTTTTACCATCTACTGGA | | AGCTCCAACATCGGGGCAGGTTTTG |
| | | | TCGGCTGGGTGCGCCAGATGCCCGG | | ATGTTCACTGGTACCAGCAGCTTCC |
| | | | GAAAGGCCTGGAGTGGATGGGGATG | | AGGAACAGCCCCCAAACTCCTCATC |
| | | | ATCTATCCTGGTGACTCTGGTACCA | | TATGGTAACAACAATCGGCCCTCAG |
| | | | GATACAGCCCGTCCTTCGAAGGCCA | | GGGTCCCTGACCGATTCTCTGGCTC |
| | | | AGTCACCATCTCAGCCGACGAGTCC | | CAAGTCTGCCACCTCAGCCTCCCTG |
| | | | ATCAACACCGCCTACCTGCAGTGGC | | GCCATCACTGGGCTCCAGGCTGAGG |
| | | | GCAGCCTGAAGGCCTCGGACACCGC | | ATGAGGCTGATTATTACTGCCAGTC |
| | | | CATGTATTACTGTGTGAGAGGTATA | | CTCTGACAGCAGCCTGAGTGGCCTT |
| | | | GCAGTGGACTGGTACTTCGATCTCT | | TATGTCTTCGGAACTGGGACCAACG |
| | | | GGGGCCGTGGCACCCTGGTCACCGT | | TAATCGTCCT |
| | | | CTCCTCAG | | |
| | C953 | 589 | CAGGTGCAGCTGGTGCAGTCTGGGG | 590 | GATATTGTGATGACTCAGTCTCCAC |
| | | | CTGAGGTGAAGAAGCCTGGGTCCTC | | TCTCCCTGCCCGTCACCCCTGGAGA |
| | | | GGTGAAGGTCTCCTGCAAGGCTTCT | | GCCGGCCTCCATCTCCTGCAGGTCT |
| | | | GGAGGCACCTTCAGCAGCTATGCTA | | AGTCAGAGCCTCCTGCATAGTAATG |
| | | | TCAGCTGGGTGCGACAGGCCCCTGG | | GATACAACTATTTGGATTGGTACCT |
| | | | ACAAGGGCTTGAGTGGATGGGAAGG | | GCAGAAGCCAGGGCAGTCTCCACAG |
| | | | ATCATCCCTATCCTTGGTATAGCAA | | CTCCTGATCTATTTGGGTTCTAATC |
| | | | ACTACGCACAGAAGTTCCAGGGCAG | | GGGCCTCCGGGGTCCCTGACAGGTT |
| | | | AGTCACGATTACCGCGGACAAATCC | | CAGTGGCAGTGGATCAGGCACAGAT |
| | | | ACGAGCACAGCCTACATGGAGCTGA | | TTTACACTGAAAATCAGCAGAGTGG |
| | | | GCAGCCTGAGATCTGAGGACACGGC | | AGGCTGAGGATGTTGGGGTTTATTA |
| | | | CGTGTATTACTGTGCGAGAGATTCC | | CTGCATGCAAGCTCTACAAACTCCT |
| | | | GAGTATAGCAGCAGCTGGTACTCAC | | CCCACTTTCGGCGGAGGGACCAAGG |
| | | | GGGGCTACTACGGTATGGACGTCTG | | TGGAAATCAAAC |
| | | | GGGCCAAGGGACCACGGTCACCGTC | | |
| | | | TCCTCA | | |
| | C954 | 591 | CAGGTGCAGCTGGTGCAGTCTGGGG | 592 | GATATTGTGATGACTCAGTCTCCAC |
| | | | CTGAGGTGAAGAAGCCTGGGTCCTC | | TCTCCCTGCCCGTCACCCCTGGAGA |
| | | | GGTGAAGGTCTCCTGCAAGGCTTCT | | GCCGGCCTCCATCTCCTGCAGGTCT |
| | | | GGGGACACGTTCACCAATTATGCTT | | AGTCAGAGCCTCCTGCATGGTGATG |
| | | | TCAGCTGGATGCGACAGGCCCCTGG | | GATACAACTATTTGGATTGGTACCT |
| | | | ACAAGGGCTTGAGTGGATGGGAAGG | | GCAGAAGCCAGGGCAGTCTCCACAC |
| | | | ATCATCCCTATTCTTGGAATAGTAA | | CTCCTGATCTATTTGGGTTCTAATC |
| | | | AGTATTCACAGAAGTTCCAGGACAG | | GGACCTCCGGGGTCTCTGACAGGTT |
| | | | GGTCAGGATTAGTGCGGACAAATCC | | CAGTGGCAGTGGATCAGGCACAGAT |
| | | | ACGAGCACAGCCTACATGGACCTGA | | TTTACACTGAAAATCAGCAGAGTGG |
| | | | GCAGCCTGAGATCTGAGGACACGGC | | AGGCTGAGGATGTTGGGGTCTATTA |
| | | | CATGTATTACTGTGCGAGAGATTCC | | CTGCATGCAAGCTCTACAAACTCCT |
| | | | GAATTCAGTACCAGCTGGTTCTCAC | | CCCACTTTCGGCGGAGGGACCAAGG |
| | | | GGGGCTACCACGGTATGGACGTCTG | | TGGAAATCAAAC |
| | | | GGGCCAAGGGACCACGGTCACCGTC | | |
| | | | TCCTCA | | |
| | C955 | 593 | CAGGTGCAGCTACAGCAGTGGGGCG | 594 | CAGTCTGTGCTGACTCAGCCGCCCT |
| | | | CAGGACTGTTGAAGCCTTCGGAGAC | | CAGTGTCTGGGGCCCCAGGGCAGAG |
| | | | CCTGTCCCTCACCTGCGCTGTCTAT | | GGTCACCATCTCCTGCACTGGGAGC |
| | | | GGTGGG | | AGCTCC |
| | | | ACCTTCAGTGGTTACTCCTGGACCT | | AACATCGGGGCAGGTTATGATGTTC |
| | | | GGATCCGCCAGCCCCCAGGGAAGGG | | ACTGGTACCAGCAGCTTCCAGGAAC |
| | | | GCTGGATTGGATTGGGGAAATCAAT | | AGCCCCCAAAGTCCTCATCTATGGT |
| | | | CATAGTGGAAGCACCAATTATAACC | | AACAACAATCGGCCCTCAGGGGTCC |
| | | | CGTCCCTCAAGAGTCGAGTCACCAT | | CTGACCGATTCTCTGGCTCCAAGTC |
| | | | ATCCGTAGACACGTCCAAGAATCAG | | TGGCACCTCAGCCTCCCTGGCCATC |
| | | | TTCTCCCTGAAGCTGAGCTCTGTGA | | ACTGGGCTCCAGGCTGAGGATGAGG |
| | | | CCGCCGCGGACACGGCTGTGTATTA | | CTGATTATTACTGCCAGTCCTATGA |
| | | | CTGTGCGAGAGCTGGTTTTGGATTC | | CACCAGCCTGAGTGGTTCGAGGGTG |
| | | | GTTATCACTTCTCGTTCAGGAACGG | | TTCGGCGGAGGGACCAAGCTGACCG |
| | | | ATCCCCTTTTTGACTACTGGGGCCA | | TCCTAG |
| | | | GGGAACCCTGGTCACCGTCTCCTCA | | |
| | | | G | | |
| | C956 | 595 | GAGGTGCAGCTGGTGGAGTCTGGGG | 596 | CAGTCTGTGCTGACGCAGCCACCCT |
| | | | GAGGCTTGGTACAGCCAGGGCGGTC | | CAGCGTCTGGGACCCCCGGGCAGAG |
| | | | CCTGAGACTCTCCTGTACAGGTTCT | | GGTCACCATCTCTTGTTCTGGAAGC |
| | | | GAATTCACCTTTGGTGATTTTTCTA | | AGCTCCAACATCGGAAGTAATCCTG |
| | | | TGAGCTGGTTCCGCCAGGCTCCAGG | | TAAACTGGTACCAGCAGCTCCCAGG |
| | | | GAAGGGGCTGGAGTGGGTAGGTTTC | | AACGGCCCCCAAACTCCTCATCTAT |
| | | | ATTAGAAGGAAAGCTGATGGTGGGA | | AGTAATAATCGGCGGCCCTCAGGGG |
| | | | CAACAGAATACGCCGCGTCTGTGAG | | TCCCTGACCGATTCTCTGGCTCCAA |
| | | | AGGCAGATTCACCATCTCAAGAGAT | | GTCTGGCGCCTCAGCCTCCCTGGCC |
| | | | GATTCCAAAAGCATCGCCTATCTTG | | ATAAGTGGGCTCCAGTCTGAGGATG |
| | | | TAATGAACAGCCTGAAAAGCGAGGA | | AGGCTGCTTATTACTGTGCAGCATG |
| | | | CACAGCCGTGTATTACTGTACTAGA | | GGATGACAGCCGGAAAGGTCCCGTG |
| | | | GCGTGGATCCCGACGCCCCATGACT | | TTCGGCGGAGGGACCAAGCTGACCG |
| | | | ACTGGGGCCAGGGAGTGCTGGTCAC | | TCCT |
| | | | CGTCTCCTCAG | | |
| | C957 | 597 | GAGGTGCAGCTGGTGGAGTCTGGGG | 598 | CAGTCTGTGCTGACGCAGCCACCCT |
| | | | GCGGCTTGGTACAGCCAGGGCGGTC | | CAGCGTCTGGGACCCCCGGGCAGAG |
| | | | CCTGAGACTCTCCTGTACAGCTTCT | | GGTCACCATCTCTTGTTCTGGAGGC |
| | | | GGATTCACCTTTGCTGATTTTTCTA | | AGCTCCAACATCGGAAGTAATCCTG |
| | | | TGACCTGGTTCCGCCAGGCTCCAGG | | TAAACTGGTACCAGCAGCTCCCAGG |
| | | | AAAGGGGCTGGAGTGGGTAGGTTTC | | AACGGCCCCCAAACTCCTCATCTAT |
| | | | ATTAGAAGAGAAGCTGATGGTGGGA | | AGTAATAATCAGCGGCCCTCAGGGG |
| | | | CAACAGAATACGCCGCATCTGTGAG | | TCCCTGACCGATTCTCTGGCTCCAA |
| | | | AGGCAGATTCACCATCTCAAGAGAT | | GTCTGGCGCCTCAGCCTCCCTGGCC |
| | | | GATTCCAAAGGCATCGCCTATCTTC | | ATCAGTGGGCTCCAGTCTGAGGATG |
| | | | TAATGAACAGCCTGAAGAGCGAGGA | | AGGCTGATTATTACTGTGCAGCTTG |
| | | | CACAGCCATGTACTACTGTTCTAGA | | GGATGACAGCCTGAAGGGTCCCGTG |
| | | | GCGTGGATCCCGACGCCCCATGACT | | TTCGGCGGAGGGACCAAGGTGACCG |
| | | | ACTGGGGCCAGGGAACGCTGGTCAC | | TCCT |
| | | | CGTCTCCTCAG | | |
| | C958 | 599 | GAGGTGCAGCTGGTGCAGTCTGGAG | 600 | CAGTCTGTGCTGACGCAGCCACCCT |
| | | | CAGAGGTGAAAAAGCCGGGGGATTC | | CAGCGTCTGGGACCCCCGGGCAGAG |
| | | | TCTGAAGATCTCCTGTAAGGGGTCC | | GGTCACCATCTCTTGTTCTGGAAGC |
| | | | GGATACAGTTTTATTAGTCACTGGA | | AGCTCCAACATCGGAAGTTATACTG |
| | | | TCGCCTGGGTGCGCCAGAAGCCCGG | | TGAACTGGTACCACCAGGTCCCAGG |
| | | | GAAAGGCCTAGAGTGGATGGGGATC | | AACGGCCCCCAAAGTCCTCATCTAT |
| | | | ATCCACCCGGGCGACTCTGATACCA | | GGTAATACTCAGCGGCCCTCAGGGG |
| | | | GATACAGCCCGTCCATCCAAGGCCA | | TCCCTGACCGATTCTCTGGCTCCAA |
| | | | GGTCACCATCTCAGCCGACAGATTC | | GTCTGGCACCTCAGCCTCCCTGGCC |
| | | | ATCACCACCGCCTACCTGCAGTGGA | | ATCAGTGGGCTCCAGTCTGAGGATG |
| | | | GCAGCCTGCAGGCCTCGGACACTGC | | AGGGTGATTATTACTGTGCAGCATG |
| | | | CATGTATTACTGTGCGAGACGGGGC | | GGATGACAGTCTGGATGGTTGGATG |
| | | | AGCAGCTGGGAAATTGATCACTGGG | | TTCGGCGGGGGGACCACGCTGACCG |
| | | | GCCAGGGAACCCTGGTCACCGTCTC | | TCCTA |
| | | | CTCAG | | |
| | C959 | 601 | CAGGTGCAGCTGCAGGAGTCGGGCC | 602 | CAGTCTGTGCTGACTCAGCCGCCCT |
| | | | CAGGACTGGTGAAGCCTTCGGAGAC | | CAGTGTCTGCGGCCCCAGGACAGAC |
| | | | CCTGTCCCTCAATTGCAATGTCTCT | | GGTCACCATCTCCTGCTCTGGAAGC |
| | | | GGTGGCTCCATCAGCAATTACTACT | | AGCTCCAACATTCGGAATAATTTTG |
| | | | GGAGCTGGATTCGGCAGCCCCCAGG | | TATCCTGGTATCAGCAGTTCCCAGG |
| | | | GAAGGGACTGGAGTGGATTGGCTTT | | GACAGCCCCCAAACTCCTCATTTAT |
| | | | ATCTCTTACAGTGGGAGCACCGACT | | GACAATAATAAGCGCCCCTCAGGGA |
| | | | ACAACCCCTCCCTCAAGAGTCGAGT | | TTCCTGACCGATTCTCTGGCTCCAA |
| | | | CATCATATCAATAGACACGTCCAAG | | GTCTGGCACGTCAGCCACCCTGGGC |
| | | | AAGCACTTCTCCCTGAACCTGAGCT | | ATCACCGGACTCCAGACTGGGGACG |
| | | | CTGTGACCGCCGCAGACACGGCCGT | | AGGCCGATTATTACTGCGGAACATG |
| | | | GTATTTCTGTGCAAGACATTACGAT | | GGATAGCAGCCCGAGTGCCTGTTGG |
| | | | ATTTTGACTGCCCTGAGTTGGTTCG | | GTGTTCGGCGCAGGGACCAAACTGA |
| | | | ACCCCTGGGGCCAGGGAACCCTGGT | | CCGTC |
| | | | CACCGTCTCCTCAG | | |
| | C960 | 603 | CAGGTGCAGCTGGTGGAGTCTGGGG | 604 | AATTTTATGCTGACTCAGCCCCACT |
| | | | GAGGCGTGGTCCAGCCTGGGAGGTC | | CTGTGTCGGAGTCTCCGGGGAAGAC |
| | | | CCTGACACTCTCCTGCACAGCCTCT | | GGTTACCATCTCCTGCACCGGCAGC |
| | | | GGATTCACCTTCAATAGATTTGCAA | | AGTGGCAGCATTGCCAACAACTATG |
| | | | TGTTCTGGGTCCGCCAGGCTCCAGG | | TGCAGTGGTACCAGCAGCGCCCGGG |
| | | | CAAGGGGCTGGAATGGGTGGCAGTT | | CAGTGCCCCCACCACTGTGATCTTT |
| | | | ATATCATTTGATGGAAGTTATGAAC | | GAAGATACCCAAAGACCCTCTGGGG |
| | | | ACTATGCAGAGTCCGTGAAGGGCCG | | TCCCTGATCGATTCTCTGGCTCCAT |
| | | | ATTCGCCATCTTCAGAGACAACCCC | | CGACAGCTCCTCCAATTCTGCCTCC |
| | | | AAGAACACACTGTATCTACAGATGA | | CTCAATATCTCTGGACTGAAGCCTG |
| | | | ACAGCCTGAGAGCCGAGGACACGGC | | AGGACGAGGCTGACTATTACTGTCA |
| | | | TGTCTACTACTGTGCGAAAAGCCCG | | GTCTTTTGATGTCAACAGTCGTTGG |
| | | | ATAAATTACTGCGCTAATGGTGTGT | | GTGTTCGGCGGAGGGACCAAGCTGA |
| | | | GCTATCCTGACTCCTGGGGCCAGGG | | CCGTCCTA |
| | | | AACCCTGGTCACCGTCTCCTCAG | | |
| | C961 | 605 | GAGGTGCAGCTGGTGGAGTCTGGGG | 606 | GACATCCAGATGACCCAGTCTCCAT |
| | | | GAGGCTTGGTCCAGCCGGGGGGGTC | | CCTCCCTGTCTGCATCTGTAGGAGA |
| | | | CCTGAGACTCTCCTGTGCAGCCTCT | | CAGAGTCACCATCACTTGCCAGGCG |
| | | | GGAATCATCGTCAGTAACAACTACA | | AGTCAGGACATTAGCAAATATTTAA |
| | | | TGAGCTGGGTCCGCCAGGCTCCAGG | | ATTGGTATCAACAGAAACCAGGGAC |
| | | | GAAGGGCCTGGAATGGGTCTCAACT | | AGCCCCTAAACTCCTGATCTACGAT |
| | | | ATTTTTAGCGGTGGGAGCACATACT | | GCATCCGAATTGGAAAGAGGGGTCC |
| | | | ACGCAGACTCCGTGAAGGACAGATT | | CATCAAGATTCAGTGGAAGTGGATC |
| | | | CACCATCTCCAGAGACAATTCCAAT | | TGGGACAGATTTTACTTTCACCATC |
| | | | AACACACTGTATCTTCAAATGAACA | | ATCAGCCTGCAGCCTGAAGATATTG |
| | | | GCCTGAGACCCGAGGACACGGCCGT | | CAACATATTACTGTCTACAGTATGA |
| | | | GTATTACTGTACGAGATTGGGGGGC | | TAATCTCCCGTACACTTTTGGCCAG |
| | | | TACCGATACGGCATGGACGTCTGGG | | GGGACCAAGCTGGAGATCAAAC |
| | | | GCCAAGGGACCACGGTCACCGTCTC | | |
| | | | CTC | | |
| | C962 | 607 | GAGGTGCAGCTGGTGGAGTCTGGGG | 608 | GACATCCAGATGACCCAGTCTCCAT |
| | | | GAGGCTTGGTCCAGCCGGGGGGGTC | | CTTCCCTGTCTGCATCTGTAGGAGA |
| | | | CCTGAGACTCTCCTGTACAGCCTCT | | CAGAGTCACCATCACTTGCCAGGCG |
| | | | AGATTGACCGTCAGTAGCAACTACA | | AGTCAGGACATTAGCAACTATTTAA |
| | | | TGAACTGGGTCCGCCAGGCTCCAGG | | ATTGGTATCAACAGTCACCAGGGAA |
| | | | GAAGGGGCTGGAGTGGGTCTCAGTT | | AGCCCCTAAGCTCCTGATCTACGAT |
| | | | ATTTATGCCGGTGGTAGCACATTCT | | GCGTCGAAATTGGAAACAGGGGTCC |
| | | | ACGCAGACTCCGTGAAGGACAGATT | | CATCAAGGTTCAGTGGAAGTGGATC |
| | | | CACCATCTCCAGAGACAATTCCATG | | TGGAACAGATTTTACTTTCACCATC |
| | | | AACACGCTATATCTTCAAATGAACA | | AGCAGCCTGCAGCCTGAAGATATT |
| | | | GCCTGAGAGTCGAGGACACGGCTGT | | GCAACATATTACTGTCTACAGTATG |
| | | | GTACTACTGTGC | | ATAATCTCCCGTACAGTTTTGGCCA |
| | | | GAGACTGGGGGGCTACCGATACGGA | | GGGGACCAAGCTGGAGATCAA |
| | | | ATGGACGTCTGGGGCCAGGGGACCA | | |
| | | | CGGTCACCGTCTC | | |
| | C963 | 609 | CAGGTGCAGCTGGTGCAGTCTGGGG | 610 | CAGTCTGTGCTGACGCAGCCGCCCT |
| | | | CTGAGGTGAAGAAGCCTGGGTCCTC | | CAGTGTCTGGGGCCCCAGGGCAGAG |
| | | | GGTGAGGGTCTCTTGCAAGGCTTCT | | GGTCACCATCTCCTGCACTGGGAGC |
| | | | GGAGGCACCTTCAGCAGTTTTACTA | | AGCTCCAACATCGGGGCAGGTTATG |
| | | | TCACCTGGGTGCGACAGGCCCCTGG | | ATGTACACTGGTACCAGCAACTTCC |
| | | | ACAAGGGCTTGAGTGGATGGGAAGG | | AGGAACAGCCCCCAAACTCCTCATC |
| | | | ATCATCCCTAATCTTAATATACCCA | | TCTGGTCACATCAATCGGCCCTCAG |
| | | | ATTACGCACAGAGATTCCAGGGCAG | | GGGTCCCTGACCGATTCTCTGGCTC |
| | | | AATCACAATTACCGCGGAGAAATCC | | CACGTCTGGCACCTCAGCCTCCCTG |
| | | | ACGAGCACAGCCTACCTGGAGCTGA | | GCCATCACTGGGCTCCAGGCTGAGG |
| | | | GCAGCCTGAGATCTGAGGACACGGC | | ATGAGGCTGATTATTACTGCCAGTC |
| | | | CGTATATTATTGTGCGAGAGGGGTC | | TTATGACAGCAGCCTGAGTGATTCG |
| | | | GGATATAGTGGAAGCGGGTCAAACT | | GTGTTCGGCGGAGGGACCAAGCTGA |
| | | | GGTACTTCGATCTCTGGGGCCGTGG | | CCGTCCT |
| | | | CACCCTGGTCACCGTCTCCTCAG | | |
| | C964 | 611 | GAAGTGCAGCTGGTGGAGTCTGGGG | 612 | GACATCCAGATGACCCAGTCTCCAT |
| | | | GAGGCTTGGTACAGCCTGGCAGGTC | | CCTCCCTGTCTGCATCTGTAGGAGA |
| | | | CCTGAGACTCTCCTGTGCAGCCTCT | | CAGAGTCACCATCACTTGCCGGGCG |
| | | | GGATTCACCTTTGATGATTATGGCA | | AGTCAGGGCATTAGCAATTATTTAG |
| | | | TGCACTGGGTCCGTCAAGCTCCAGG | | CCTGGTATCAGCAGAGCCCAGGGAA |
| | | | GAAGGGCCTGGAGTGGGTCTCAGGT | | AGTTCCTAAGCTCCTGATCTATGCT |
| | | | ATTAGTTGGAACAGTGGTAGTATAG | | GCATCCACTTTGCAATCAGGGGTCC |
| | | | CCTATGCGGAATTTGTGAAGGGCCG | | CATCTCGGTTCAGTGGCAGTGGATC |
| | | | ATTCACCATCTCCAGAGACAACGCC | | TGGGACAGATTTCACTCTCACCATC |
| | | | AAGAACTCCCTGTATCTGCAAATGA | | AGCAGCCTGCAGCCTGAAGATGTTG |
| | | | ACAGTCTGAGAACTGAGGACACGGC | | CAACTTATTACTGTCAAAAGTATAA |
| | | | CTTGTATTACTGTGCAAAAGCGGTT | | CAGTGGCCCTGCGCTCACTTTCGGC |
| | | | CCTACCAGCTGCTATGTGTTTTGTG | | GGAGGGACCAAGGTGGAAATCAAAC |
| | | | CTCTTGATATTTGGGGCCAAGGGAC | | |
| | | | AATGGTCACCGTCTCTTCAG | | |
| | C965 | 613 | GAGGTGCAGCTGGTGGAGTCTGGGG | 614 | GAAATAGTGATGACGCAGTCTCCAG |
| | | | GAGGCTTGGTAAAGCCAGGGCGGTC | | CCACCCTGTCTGTGTCTCCAGGGGA |
| | | | CCTGAGACTCTCCTGTTCAGCTTCT | | AAGAGCCACCCTCTCCTGCAGGGCC |
| | | | GGATTCACCTTTGGTGATTATGCTA | | AGTCAGAGTGTTAGCAGCAACTTAG |
| | | | TGACCTGGTTCCGCCAGGCTCCAGG | | CCTGGTACCAGCAGAAACCTGGGCA |
| | | | GAAGGGGCTGCAGTGGGTTGGTTTC | | GGCTCCCAGGCTCCTCATCTATGGT |
| | | | ATTAGAAGCAAACCTTTTGGTGGGA | | GCATCCATCAGGGCTACTGGTATCC |
| | | | CAACACAATACGCCGCGTCTGTGAA | | CAGCCAGGTTCAGTGGCAGTGGGTC |
| | | | AGGCAGATTCACCATCTCAAGAGAT | | TGGGACAGAGTTCACTCTCACCATC |
| | | | GATTCCAACAACGTCGCCTATCTGC | | AGCAGCCTGCAGTCTGAAGATTTTG |
| | | | AAATGAACAGCCTTAAAACCGAGGA | | TTGTTTATTACTGTCAGGAGTATGA |
| | | | CACAGGCGTGTATTATTGTACTAGA | | TAACTGGTTCGCTTTCGGCGGAGGG |
| | | | TTAAGACAGGTTCAGGGAGTCCCCG | | ACCAAGGTGGAAATCAAAC |
| | | | GGTACTACTTTGACCAGTGGGGCCA | | |
| | | | GGGAGCCCTGGTCACCGTCTCCTCA | | |
| | | | G | | |
| | C966 | 615 | GAGGTGCAGCTGGTGGAGTCTGGGG | 616 | GACATCCAGATGACCCAGTCTCCAT |
| | | | GAGGCTTGATACAGCCTGGGGGGTC | | CCTCCCTGTCTGCATCTGTAGGAGA |
| | | | TCTGAGACTCTCCTGTGCAGCCTCT | | CAGAGTCACCATCACTTGCCGGGCA |
| | | | GGATTCACCTTCAGTAGCTACGACA | | AGTCAGAGCATTGGCAGACATTTAA |
| | | | TGCACTGGGTCCGCCAAGTTAC | | GTTGGCATCAGCAGAAACTAGGGA |
| | | | AGGAAAAGGTCTGGAGTGGGTCTCA | | AAGCCCCTAAGCTCCTCATTTATAG |
| | | | GCTATTGGTACTGCTGGAGACAGAT | | TGCATCCAGTTTGCAAAGTGGGGTC |
| | | | ACTATCTAGACTCCGTGAAGGGCCG | | CCATCAAGGTTCAGTGGCAGTGGAT |
| | | | ATTCACCATCTCCAGAGAAAATGCC | | CTGGGACAGATTTCACTCTCACCAT |
| | | | AAGAACTCCCTGCATCTTCAGATGA | | CAGCAGTCTACAACCTGAAGATTTT |
| | | | ACAACCTGAGAGTCGGAGACACGGC | | GCAACTTACTACTGTCAACAGAGTT |
| | | | TGTGTATTACTGTGCAAGAGCCTCT | | ACGAAACCCCTCCGTGGACGTTCGG |
| | | | GGAGTCCTTACTACACACTTTGACT | | CCAAGGGACCAAGGTGGAGATCAAA |
| | | | CCTGGGGCCGGGGAACCCTGGTCAC | | C |
| | | | CGTCTCCTCAG | | |
| | C967 | 617 | CAGGTGCAGCTGGTGGAGTCTGGGG | 618 | GACATCCAGATGACCCAGTCTCCAT |
| | | | GAGGCGTGGTCCAGCCTGGGAGGTC | | CCTCCCTGTCTGCGTCTGTAGGGGA |
| | | | CCTGAGACTCTCATGTGCAGCGTCT | | CAGAGTCACCATCACTTGCCGGGCA |
| | | | GGATTCACCTTCAGAATTTATGCCA | | AGTCAGACCATTAGCACCTTTTTAA |
| | | | TGCACTGGGTCCGCCAGGCTCCAGG | | ATTGGTATCGACAAATACCAGGAAA |
| | | | CAAGGGACTGGAGTGGGTGGCAATT | | AGCCCCTAAACTCCTGATCTATGCT |
| | | | ATCTGGAATGATGGAAGTAAACAAT | | GCATCCAGTTTGCAAAGTGGGGTCC |
| | | | ATTATGCAGACTCCATGAAGGGCCG | | CCTCAAGGTTCAGTGGCAGTGGGTC |
| | | | ATTCACCATCTCCAGAGACAATTCC | | TGGGACAGATTTCACTCTCACCATC |
| | | | AAGAACACACTGTATCTGCAAATGA | | AGCAGTCTCCAACCTGAAGATTTTG |
| | | | ACAGCCTGAGAGACGAGGACACGGC | | CAACTTACTACTGTCAACAGACTTA |
| | | | TCTGTATTACTGTGCGAGAGAGGGT | | CAGTACCCCGTACACTTTTGGCCGG |
| | | | GTTGCATTAGCCGGCAACGGCGTCG | | GGGACCAAGCTGGAGATCAAAC |
| | | | ATGGTTTTGATATCTGGGGCCAAGG | | |
| | | | GACAATGGTCACCGTCTCTTCAG | | |
| | C968 | 619 | CAGGTGCAGCTGGTGGAGTCTGGGG | 620 | GACATCCAGATGACCCAGTCTCCAT |
| | | | GAGGCGTGGTCCAGCCTGGGAGATC | | CCTCCCTGTCTTCATCTGTAGGGGA |
| | | | CCTGAGACTCTCCTGTGCAGCGTCT | | CAGAGTCACCATCACTTGTCGGGCA |
| | | | GGATTCACCTTCAGAATTTATGCCA | | AGTCAGAGCATTGGCATCTATTTAA |
| | | | TGCACTGGGTCCGCCAGGCTCCAGG | | ATTGGTATCAACAAAAACCAGGGAA |
| | | | CAAGGGGCTGGAGTGGGTGGCAATT | | GGTCCCTAACCTACTGATCTATGCT |
| | | | ATATGGAATGATGGAAATAAAAAGG | | GCATCCACTTTGCAAACTGGGGCCC |
| | | | ACTATGTAGACTCCGTGAAGGGCCG | | CATCAAGGTTCAGTGGCAGTGGATC |
| | | | ATTCACCATCTCCAGAGACAATTCC | | TGGGACAGATTTCATTCTCAGCATC |
| | | | AGGAACACAGTGTATCTGCAAATGA | | AGCAGTCTCCAACCTGAAGATTTTG |
| | | | ACAGCCTGAGAGTCGATGAGGACAC | | CAACTTACTACTGTCAACAGACTTA |
| | | | GGCTGTGTATTATTGTGCGAGAGAG | | CAGTGTCCCGTACACTTTTGGCCAG |
| | | | GGTGTAGCAGTAGGTGGTAACGGCG | | GGGACCAAGCTGGAGATCAAAC |
| | | | TTGATGGTTTTGATATGTGGGGCCA | | |
| | | | AGGGACAATGGTCACCGTCTCTTCA | | |
| | | | G | | |
| | C969 | 621 | CAGGTGCAGCTGCAGGAGTCGGGCC | 622 | TCCTATGAGCTGACACAGCCACCCT |
| | | | CAGGACTGGTGAAGCCTTCGGAGAC | | CAGTGTCCGTGTCCCCAGGACAGAC |
| | | | CCTGTCCCTCACCTGCACTGTCTCT | | AGCCAGCATCACCTGCTCTGGAGAT |
| | | | GGTGGCTCCATCAGTAGTTACTACT | | AAATTGGGGGATAAATATGCTTGCT |
| | | | GGAGCTGGATCCGGCAGCCCCCAGG | | GGTATCAGCAGAAGCCAGGCCAGTC |
| | | | GAAGGGACTGGAGTGGATTGGGTAT | | CCCTGTGCTGGTCATCTATCAAGAT |
| | | | ATCTATTACAGTGGGAGCACCAACT | | AGCAAGCGGCCCTCAGGGATCCCTG |
| | | | ACAACCCCTCCCTCAAGAGTCGAGT | | AGCGATTCTCTGGCTCCAACTCTGG |
| | | | CACCATATCAGTAGACACGTCCAAG | | GAACACAGCCACTCTGACCATCAGC |
| | | | AACCAGTTCTCCCTGAAGCTGAGCT | | GGGACCCAGGCTATGGATGAGGCTG |
| | | | CTGTGACCGCCGCAGACACGGCCGT | | ACTATTACTGTCAGGCGTGGGACAG |
| | | | GTATTACTGTGCGAGACTATTATCC | | CAGCACTGCTTATGTCTTCGGAACT |
| | | | ACGGAGTGGTTATTTAACTGGTTCG | | GGGACCAAGGTCACCGTCCTAG |
| | | | ACCCCTGGGGCCAGGGAACCCTGGT | | |
| | | | CACCGTCTCCTCAG | | |
| | C970 | 623 | CAGGTGCAGCTGCAGGAGTCGGGCC | 624 | TCCTATGAGCTGACTCAGCCACCCT |
| | | | CAGGACTGGTGAAGCCTTCGGAGAC | | CAGTGTCCGTGTCCCCAGGACAGAC |
| | | | CCTGTCCCTCACCTGCACTGTCTCT | | AGCCAGCATCACCTGCTCTGGAGAT |
| | | | GGTGACTCCATCAATAAATACTACT | | ACATTGGGGGATAAATATGCTTGCT |
| | | | GGGGCTGGATCCGGCAGCCCCCAGG | | GGTATCAGCAGAAGCCAGGCCAGTC |
| | | | GAAGGGACTGGAGTGGATTGGGTAT | | CCCTCTCCTGGTCATCTATCAAAAT |
| | | | ATCTACTACAGTGGGACCACCAACT | | AACAAGCGGCCCTCAGGGATCCCTG |
| | | | ACAACCCCTCCCTCAAGAGTCGAGT | | AGCGATTCTCTGGCTCCAACTCTGG |
| | | | CACCATATCAGTAGACACGTCTAAG | | GAACACAGCCACTCTGACCATCAGC |
| | | | ACCCAGTTCTCCCTGAAGCTGAGCT | | GGGACCCAGGCTATGGATGAGGCTG |
| | | | CTGTGACCGCCGCAGACACGGCCGT | | ACTATTACTGTCAGGCGTGGGACAG |
| | | | GTATTACTGTGCGAGACTATTATCT | | CAGCACTGCTTATGTCTTCGGAACT |
| | | | ACGGAGTGGTCATTTAACTGGTTCG | | GGGACCAAGGTCACCGTCCTAG |
| | | | ACCCCTGGGGCCAGGGAACCCTGGT | | |
| | | | CACCGTCTCCTCAG | | |
| | C971 | 625 | GAGGTGCAGCTGGTGGAGTCTGGGG | 626 | GAAATTGTGTTGACGCAGTCTCCAG |
| | | | GAGGCTTGGTAAAGCCTGGGGGGTC | | GCACCCTGTCTTTGTCTCCAGGGGA |
| | | | CCTTAGACTCTCCTGTGCAGCCTCT | | AAGAGCCACCCTCTCCTGCAGGGCC |
| | | | GGATTCACTTTCAATAACGCCTGGA | | ACTCAGGCTATTAGCAGCACCTACT |
| | | | TGACCTGGGTCCGCCAGGCTCCAGG | | TAGCCTGGTACCAGCAGAAACCTGG |
| | | | GAAGGGGCTGGAGTGGGTTGGCCGT | | CCAGGCTCCCAGGCTCCTCATCTAT |
| | | | ATTAAAAGCAAAACTGATGGTGGGA | | GGTGCATTCAGCAGGGCCCCTGGCA |
| | | | CAACGGACTACGGTACACCCGCGAA | | TCCCAGACAGGTTCAGTGGCAGTGG |
| | | | AGGCAGATTCACCATCTCAAGAGAT | | GTCTGAGACAGACTTCACTCTCACC |
| | | | GACTCAAAAAACACGTTGTATCTGC | | ATCAGCAGACTGGAGCCTGAAGATT |
| | | | AAATGAAAAGCCTGAGAACCGAGGA | | TTGCAGTGTATTACTGTCAACAGTC |
| | | | CACAGCCGTCTATTATTGTACTACA | | TGATAGGTCACCTTTCACTTTCGGC |
| | | | GTAGACGTACAAGGAATTTGGGAGC | | CCTGGGACCAAAGTGGATATCAAAC |
| | | | TGCTAGAGAATGATGCCTTTGATAT | | |
| | | | CTGGGGCCAAGGGACAATGGTCACC | | |
| | | | GTCTCTTCAG | | |
| | C972 | 627 | GAGGTGCAGCTGGTGGAGTCTGGGG | 628 | GACATCCAGTTGACCCAGTCTCCAT |
| | | | GAGGCTTGGTCCAGCCTGGGGGGTC | | CCTTCCTGTCTGCATCTGTAGGAGA |
| | | | CCTGAGACTCTCCTGTGCAGCCTCT | | CAGAGTCACCATCACTTGCCGGGCC |
| | | | GAATTCATCGTCAGTAGAAACTACA | | AGTCAGGGCATTAGCAGTTATTTAG |
| | | | TGAGCTGGGTCCGCCAGGCTCCAGG | | CCTGGTATCAGCAAGACCCAGGGAA |
| | | | GAAGGGGCTGGAGTGGGTCTCACTT | | AGCCCCTAAACTCCTGATCTATGCT |
| | | | ATTTATCCCGGTGGTAGCACATATT | | GCGTCCACTTTGCAGAGTGGCGTCC |
| | | | ATCCAGACTCCGTGAAGGGCAGATT | | CATCAAGGTTCAGCGGCAGTGGATC |
| | | | CACCATCTCCAGAGACAATTCCAAG | | TGGGACAGAATTCACTCTCACAATC |
| | | | AACACACTGTATCTTCAAATGAACA | | AGCAGCCTGCAGCCTGAAGATTTTG |
| | | | GCCTGAGAGGCGAGGACACGGCTGT | | CAACTTATTACTGTCAACAACTTGA |
| | | | ATATTACTGTGCGAGAGATTTAGGT | | TAGTTACCCTCCAGGGTACAGTTTT |
| | | | GATAGTCGCCTTGACTACTGGGGAC | | GGCCAGGGGACCAAGCTGGAGATCA |
| | | | AGGGAGCCCTGGTCACCGTCTCCTC | | AAC |
| | | | AG | | |
| | C973 | 629 | GAGGTGCAGCTGGTGGAGTCTGGGG | 630 | CAGACTGTGGTGACTCAGGAGCCCT |
| | | | GAGGCTTGGAAAAGCCAGGGCGGTC | | CACTGACTGTGTCCCCAGGAGGGAC |
| | | | CCTGAGACTCTCCTGTATAGGTTCT | | AGTCACTCTCACCTGTGGCTCCAGC |
| | | | GGATTCACCTTCGGTGATTATGCTA | | ACTGGAACTGTCACCAGTGGTCAGT |
| | | | TGGGCTGGTTCCGCCAGGCTCCAGG | | ATCCCTACTGGTTCCAGCAGAAGCC |
| | | | GAAGGGGCTGGAGTGGGTAGGTTTC | | TGGCCAAGCCCCCAAGACACTGATT |
| | | | ATTAGAAGTAAAGCTTATGGTGGGG | | TATGATACAAGCAGCAAACACTCCT |
| | | | CATCAGAATACGCCGCGTCTGTGAA | | GGACCCCTGCCCGGTTTTCAGGCTC |
| | | | AGGCAGATTCACCATCTCAAGAGAT | | CCTCCTTGGGGGCAAAGCTGCCCTG |
| | | | GATTCCAAAAGCATCGCCTATCTGC | | ACCCTTTCGGGTGCGCAGCC |
| | | | AAATGAACAGCCTGAAAACCGAGGA | | TGAGGATGAGGCTGAGTATTACTGC |
| | | | CACAGCCGTCTA | | TTGATCTCCTATAGTGGTGCTTGGG |
| | | | TTTTTGTACTAGAAGAGCCCATTAC | | TGTTCGGCGGAGGGACCAAGCTGAC |
| | | | TCTGGTTCAGGACTTAGCAGTTATG | | CGTCCTA |
| | | | TTGACTACTGGGGCCAGGGAACCCT | | |
| | | | GGTCACCGTCTCCTCAG | | |
| | C974 | 631 | GAGGTGCAGCTGGTGGAGTCTGGGG | 632 | GACATCCAGATGACCCAGTCTCCAT |
| | | | GAGACTTGACACAGCCGGGGGGGTC | | CCTCCCTGTCTGCATCTGTAGGAGA |
| | | | CCTGAGACTCTCCTGTGCAGCCTCT | | CAGAGTCACCATCACTTGCCGGACA |
| | | | GGATTCACCTTCAGCAACTACGACA | | AGTCAGACCATTAGCACCTATTTAA |
| | | | TGCACTGGGTCCGCCAAGCTACAGG | | ATTGGTATCAGCAGAAACCAGGGAA |
| | | | AAAAGGTCTGGAGTGGGTCTCAGGT | | AGCCCCTAAGGTCCTGATCTTTGCT |
| | | | ATTGGTACTTCTGGTGACACATACT | | GCGTCCAGTTTGCAAAGTGGGGTCC |
| | | | ATGCAGACTCCGTGAAGGGCCGATT | | CATCAAGATTCAGTGGCAGTGGATC |
| | | | CACCATCTCCAGAGAAAATGCCAAG | | TGGGACAGATTTCACTCTCACCATC |
| | | | AACTCCTTGTTTCTTCAAATGAATC | | AGCAGTCTGCAACCTGAAGATTTTG |
| | | | ATCTGAGAGCCGGGGACACGGCTAC | | CAACTTACTTCTGTCAACAGAGTTA |
| | | | GTATTACTGTGCAAGAACGGAGTAC | | CAGTGCCCCTCCGTGGACGTTCGGC |
| | | | GCTTGGGGGAGTTATCGTTCCTACT | | CCAGGGACCAAGGTGGAGATCAAAC |
| | | | GGTACTTCGACCTCTGGGGCCGAGG | | |
| | | | CACCCTGGTCACCGTCTCCTCAG | | |
| | C975 | 633 | GAGGTGCAGCTGGTGGAGTCTGGGG | 634 | GACATCCAGATGACCCAGTCTCCAT |
| | | | GAGACTTGACACAGCCTGGGGGGTC | | CCTCCCTGTCTGCATCTGTAGGAGA |
| | | | CCTGAGACTCTCCTGTGCAGCCTCT | | CAGAGTCACCATCACTTGCCGGACA |
| | | | GGATTCACCTTCAGCAGCTACGACA | | AGTCAGACCATTAGCACCTATTTAA |
| | | | TGCACTGGGTCCGCCAAGCTACAGG | | ATTGGTATCAGCAGAAACCAGGGAA |
| | | | AAAAGGTCTGGAGTGGGTCTCAGGT | | AGCCCCTAAGGTCCTGATCTATGCT |
| | | | ATTGGTACTTCTGGTGACACATACT | | GCGTCCAGTTTGCAAAGTGGGGTCC |
| | | | ATGCAGACTCCGTGAAGGGCCGATT | | CATCAAGATTCAGTGGCAGTGGATC |
| | | | CACCATCTCCAGAGAAAATGCCAAG | | TGGGACAGATTTCACTCTCACCATC |
| | | | AACTCTTTGTTTCTTCAAATGAATA | | AGCAGTCTGCAACCTGAAGATTTTG |
| | | | ATCTGAGAGCCGGGGACACGGCTAC | | CAACTTACTTCTGTCAACAGAGTTA |
| | | | GTATTACTGTGCAAGAACGGAGTAC | | CAGTGCCCCTCCGTGGACGTTCGGC |
| | | | GCTTGGGGGAGTTATCGTTCCTACT | | CCAGGGACCAAGGTGGAAATCAAAC |
| | | | GGTACTTCGATCTCTGGGGCCGAGG | | |
| | | | CACCCTGGTCACCGTCTCCTCAG | | |
| | C976 | 635 | GAGGTGCAGCTGGTGGAGTCTGGGG | 636 | TCCTATGAGCTGACACAGCCACCCT |
| | | | GCGCCTTGATCCAGCCGGGGGGATC | | CGGTGTCACTGGCCCCAGGACAGAC |
| | | | CCTGAGACTCTCCTGTGCAGCCTCT | | GGCCAGGATTACCTGTGGGGGAAAC |
| | | | GGGTTCACCGTCAGTAGCAACGACA | | GGCATTGGAAGTAAATCTGTACACT |
| | | | TGACCTGGGTCCGCCAGGCTCCAGG | | GGTACCAGCAGAAGCCAGGCCGGGC |
| | | | GAAGGGGCTGGAGTGGGTCTCAGTT | | CCCTGTGCTGGTCGTCTATGACGAC |
| | | | ATTTATACCGGTGGTGGAACATATC | | AGCGTCCGGCCCTCAGGGACCCCTG |
| | | | ACGCAGACTCCGCGAAGGGACGATT | | CGCGATTTTCTGGCGCCAACTCTGG |
| | | | CATCATCTCTAGACACAACTCCAAG | | GAACACGGCCACCCTGACCATCAGC |
| | | | AACACGTTGTCTCTTCAAATGAACG | | AGGGTCGAAGCCGGGGATGAGGCCG |
| | | | ACCTGAGAGCTGAGGACACGGCCGT | | ACTATTACTGTCAGGTGTGGGATAG |
| | | | GTATTACTGTGCGAGACTGACTATG | | TTTTAGAGATCATCAAGATTGGGTG |
| | | | ACCACATACTACTTTGACTCCTGGG | | TTCGGCGGAGGGACCAAGCTGACCG |
| | | | GCCAGGGAACCCTGGTCACCGTCTC | | TCCTAG |
| | | | CTCAG | | |
| | C977 | 637 | GAGGTGCAGCTGGTGGAGTCTGGGG | 638 | GACATCCAGATGACCCAGTCTCCAT |
| | | | GAGGCTTGGTACAGCCGGGGGGGTC | | CCTCCCTGTCTGCATCTGTCGGAGA |
| | | | CCTGAGACTCTCCTGTGCAGCCTCT | | CAGAGTCACCATCACTTGCCGGGCA |
| | | | GGATTCACCTTCAGTAACTACGACA | | AGTCAGAGCGTTACTAGGTATTTAA |
| | | | TGCACTGGGTCCGCCAAGTCAC | | ATTGGTATCAGCTGAAACCAGGGAA |
| | | | AGGAAAAGGTCTGGAGTGGGTCTCA | | AGCCCCTAAGCTCCTGATCTATGCT |
| | | | CTTATTGGTACTGCTGCTGACGCAT | | GCATCCAGTTTGCAAAGTGGGGTCC |
| | | | ACTATGCAGACTCCGTGAAGGGCCG | | CATCAAGGTTCAGTGGCAGTGGATC |
| | | | ATTCACCATCTCCAGAGAAAATGCC | | TGGGACAGATTTCACTCTCACCATC |
| | | | AAGAACTCCTTATACCTTCAAATAA | | AGCAGTCTGCAACCTGAAGATTTTG |
| | | | ACAGCCTGAGAGCCGGGGACACGGC | | CAACTTATTACTGTCAACAGAGTTA |
| | | | TGTGTATTTCTGTGCAAGAGGAGAT | | CAGTACCCTCGGGCTCACTTTCGGC |
| | | | AGCAGTGGCTTATACACTTTTTTTG | | GGAGGGACCAAGGTGGAGATCA |
| | | | ACTACTGGGGCCAGGGAACCCTGGT | | |
| | | | CACCGTCTCCTCAG | | |
| | C978 | 639 | CAGGTGCAGCTGGTGCAGTCTGGGG | 640 | CAGTCTGTGCTGACGCAGCCGCCCT |
| | | | CTGAGGTGAAGAAGCCTGGGTCCTC | | CAGTGTCTGGGGCCCCAGGGCAGAG |
| | | | GGTGAAGGTCTCCTGCAAGGCTTCT | | GGTCACCATTTCCTGCACTGGTACC |
| | | | GGAGCCACCTTCAGCAACTATATTA | | AACTCCAACATCGGGGCAGGTTATG |
| | | | TTTCCTGGGTGCGACAGGCCCCTGG | | ATATACACTGGTACCAGCAGCTTCC |
| | | | ACAAGGGCTTGAGTGGATGGGAAGG | | AGGAACGGCCCCCAAACTCCTCATC |
| | | | ACCATCCCTCTCCTTGATATTGCAA | | TATGGTAGCAATAATCGGCCCTCAG |
| | | | ACTACGCACAGAAATTCCAGGGCAG | | GGGTCCCTGACCGATTCTCTGGCTC |
| | | | AGTCACCATAACCGCGGACAAATCC | | CAAGTCTGGCACCTCAGCCTCCCTG |
| | | | ACGCGCATTGTCTACATGCACCTGG | | GCCATCACTGGGCTCCAGGCTGAGG |
| | | | GCAGTCTGACATCTGAGGACACGGC | | ATGAAGCTGATTATTACTGCCAGTC |
| | | | CGTCTATTACTGTGCGACAGGAAAG | | CTATGACAGCAGCCTGAGTGGATCG |
| | | | GGGTATAGCAGCTCTTCCGCGGCTT | | GAGGTGTTCGGCGGGGGACCAAGTT |
| | | | ACTACTTTGACCACTGGGGCCAGGG | | GACCGTCCTAG |
| | | | AACCCTGGTCACCGTCTCCTCAG | | |
| | C979 | 641 | CAGGTGCAGCTGGTGGAGTCTGGGG | 642 | CAGTCTGCCCTGACTCAGCCTGCCT |
| | | | GAGGCGTGGTCCAGCCTGGGAGGTC | | CCGTGTCTGGGTCTCCTGGACAGTC |
| | | | CCTAAGACTCTCCTGTGTAGCCTCT | | GATCACCATCTCCTGCACTGGCACC |
| | | | GGATTCACCTTCAGTAACTACGGCA | | AACAGTGACGTTGGTGGTTATGACT |
| | | | TGCACTGGGTCCGCCAGGCTCCAGG | | ATGTCTCCTGGTACCAACAGCACCC |
| | | | CAAGGGGCTGGAGTGGGTGGCAGTT | | AGGCAAAGCCCCCAAACTCATAATT |
| | | | ATATTATATGATGGAAGTGATAAAT | | TTTGAAGTCATTAATCGACCCTCAG |
| | | | ACTATTTAGACTCCGTGAAGGGCCG | | GGGTTTCTAATCGCTTCTCTGGCTC |
| | | | ATTCACCATCTCCAGAGACAATTCC | | CAAGTCTGGCAACACGGCCTCCCTG |
| | | | AAGAACACACTGTTTCTGCAATTGA | | ACCATCTCTGGGCTCCGGGCTGAGG |
| | | | ACAGCCTGAGAGCTGAGGACACGGC | | ACGAGGCTGATTATTACTGCTGTTC |
| | | | TGTGTATTACTGTGCGAAAGAAGGA | | ATATACAACCAGCACCACTCGGGTC |
| | | | AACGGCTATGGTTACCAGTACGCCG | | TTCGGCGGAGGGACCAAGCTGACCG |
| | | | GTATGGACGTCTGGGGCCAAGGGAC | | TCCTAG |
| | | | CACGGTCACCGTCTCC | | |
| | C980 | 643 | CAGGTGCAGCTGGTGGAGTCTGGGG | 644 | GAAATAGTGATGACGCAGTCTCCAG |
| | | | GAGGCGTGGTCCAGCCTGGGAGGTC | | CCACCCTGTCTGTGTCTCCAGGGGA |
| | | | CCTAAGACTCTCCTGTGTAGCCTCT | | AAGAGCCACCCTCTCCTGCAGGGCC |
| | | | GGATTCACCTTCAGTAACTACGGCA | | AGCGAGAGTGTTAGCAGCAAGTTAG |
| | | | TGCACTGGGTCCGCCAGGCTCCAGG | | CCTGGTACCAGCAGAAACCTGGCCA |
| | | | CAAGGGGCTGGAGTGGGTGGCAGTT | | GGCTCCCAGGCTCCTCATCTATGGT |
| | | | ATATTATATGATGGAAGTGATAAAT | | GCATCCACCAGGGCCACTGGTATCT |
| | | | ACTATTTAGACTCCGTGAAGGGCCG | | CAGCCAGGTTCAGTGGCAGTGGGTC |
| | | | ATTCACCATCTCCAGAGACAATTCC | | TGGGACAGATTTCACTCTCACCATC |
| | | | AAGAACACACTGTTTCTGCAATTGA | | AGCAGCCTGGAGTCTGAAGATTTTG |
| | | | ACAGCCTGAGAGCTGAGGACACGGC | | CAGTTTATTACTGTCAGCAGTATAA |
| | | | TGTGTATTACTGTGCGAAAGAAGGA | | TCACTGGCCTCCGAACACTTTTGGC |
| | | | AACGGCTATGGTTACCAGTACGCCG | | CAGGGGACCAAGCTGGAGATCAAAC |
| | | | GTATGGACGTCTGGGGCCAAGGGAC | | |
| | | | CACGGTCACCGTCTCC | | |
| | C981 | 645 | GAGGTGCAGCTGGTGGAGTCTGGGG | 646 | GACATCCAGATGACCCAGTCTCCAT |
| | | | GAGGCTTGGTACAGCCTGGGGGGTC | | CCTCCCTGTCTGCATCTGTAGGAGA |
| | | | CCTGAGACTCTCCTGTGCAGCCTCT | | CAGAGTCACCATCACTTGCCGGGCA |
| | | | GGTTTCACCTTCAGCAACTACGACA | | AGTCAGAGTATTAGCAGCCATTTAA |
| | | | TGCACTGGGTCCGCCAAGTTACAGG | | ATTGGTATCAGCAAAAACCAGGGAA |
| | | | GAACGGTCTGGAGTGGGTCGCAGCT | | AGTCCCTAAACTCCTGATCTATGCT |
| | | | ATTGGTACTTCTGGTGACACATACT | | GCATCCACTTTGCAAAGTGGGGTCC |
| | | | ATCCAGACTCCGTGAAGGGCCGATT | | CATCAAGGTTCAGTGGCAGTGGATC |
| | | | CACCATCTCCAGAGAGAATGTCAAG | | TGGGACAGACTTCACTCTCACCATC |
| | | | AACTCCTTGTTTCTTCAAATGAACT | | AGCAGTCTGCAACCTGAAGACTTTG |
| | | | CCCTGAGAGCCGGGGACACGGCTGT | | CAACCTACTACTGTCAACAGAGTTA |
| | | | CTATTACTGTGCAAGAGGGGGTAGC | | TAGTATGCCCCCGGTCACCTTCGGC |
| | | | AGCAGCTGGCTCTGGTACTTCGATC | | CAAGGGACACGACTGGAGATTAAAC |
| | | | TCTGGGGCCGTGGCACCCTGGTCA | | |
| | C982 | 647 | GAGGTGCAGCTGGTGGAGTCTGGGG | 648 | GACATCCAGATGACCCAGTCTCCAT |
| | | | GAGGCTTGGTACAGCCTGGGGGGTC | | CCTCCCTGTCTGCATCTGTGGGAGA |
| | | | CCTGAGACTCTCCTGTGCAGCCTCT | | CAGAGTCACCATCACTTGCCGGGCA |
| | | | GGATTCACCTTCAGTAACTACGACA | | AGTCAGAACATTAGCAGATATTTAA |
| | | | TGCACTGGGTCCGCCAACCTACAGG | | ATTGGTATCAGCAGAAACCAGGGAA |
| | | | AGGAGGTCTGGAGTGGGTCTCAGCT | | AGCCCCTCGGCTCCTGATCTATGCT |
| | | | ATTGGTACTGCTGGTGACACATACT | | GCATCCACTTTGCAAAGTGGGGTCC |
| | | | ATCTAGCCTCCGTGAAGGGCCGATT | | CATCAAGGTTCAGTGCCAGTGGATC |
| | | | CACCATCTCCAGAGAAAATGCCAAG | | TGGGACAGACTTCACTCTCACCATC |
| | | | AACTCCTTGTCTCTTCAAATGAACA | | ACCAATCTGCAACCTGAAGATTTTG |
| | | | GCCTGAGAGCCGGGGACACGGCTGT | | CAGTTTATTACTGTCAACAGACTTA |
| | | | GTATTATTGTGTAAGAGGGGATACT | | CGTTATGCCTCCCTACACTCTTGCC |
| | | | CTGGTTCAGGGAGTTATTAAGGCCT | | CAGGGGACCAAGCTGGAGATCAAAC |
| | | | ACTACTACTACTTTATGGACGTCTG | | |
| | | | GGGCCAAGGGATCACGGTCACCGTC | | |
| | | | TCCTCA | | |
| | C983 | 649 | CAGGTGCAGCTGGTGGAGTCTGGGG | 650 | GACATCCAGATGACCCAGTCTCCAT |
| | | | GGGGCGTGGTCCGGCCTGGGAGGTC | | CCTCCCTGTCTGCATATGTAGGAGA |
| | | | CCTGAGACTCTCCTGTGCAGCCTCT | | CAGAGTCACCATCACTTGCCAGGCG |
| | | | GGATTCACCTTCAGTAAATATGGCA | | AGTCAGGACATTAGTAACCATTTAA |
| | | | TGCACTGGGTCCGCCAGGCTCCAGG | | ATTGGTATCAGCAGAAACCAGGGAA |
| | | | CAAGGGGCTGGAGTGTGTGGCATCT | | AGCCCCTAACCTCCTGATCTACGAT |
| | | | ATAGCGTATGATGGAAGTGATGACT | | GCATCCAATTTGGAAACAGGGGTCC |
| | | | CCTACGCAGACTCCGTGAAGGGCCG | | CATCAAGGTTCAGTGGAAGTGGATC |
| | | | ATTCATCATCTCCAGAGACAATTCC | | TGGGACAGATTTTTCTTTCACCATC |
| | | | AAGAACACGCTGTATCTGCAAATGA | | AGCAGCCTGCAGCCTGAAGATATTG |
| | | | ACAGCCTGAGAGCTGCGGACACGGC | | CAACATATTACTGTCAACAGTATGA |
| | | | TGTGTATTACTGTGCGAAAGTTCTT | | TAATGTCCCTCCGTGGACGTTCGGC |
| | | | GGCTCATATTGTAGTGCTAGTAGCT | | CAAGGGACCAAGGTGGAGATCAAAC |
| | | | GCCACGGACAAAGGCCTGACTATTG | | |
| | | | GGGCCAGGGAACCCTGGTCACCGTC | | |
| | | | TCCTCAG | | |
| | C984 | 651 | CAGGTGCAGCTGGTGCAGTCTGGGA | 652 | CAGTCTGCCCTGACTCAGCCTGCCT |
| | | | CTGAGGTGAAGAAGCCTGGGGACTC | | CCGTGTCTGGGTCTCCTGGACAGTC |
| | | | AGTGCAGGTCTCCTGCAAGACTTCT | | GATCACCATCTCCTGCACTGGAACC |
| | | | GGATACAGCTTCACCGGCTACTATA | | AGCAGTGACGTTGGAGGTTATTACT |
| | | | TCCACTGGGTGCGACAGGCCCCTGG | | ATGTCTCCTGGTACCAACAACACCC |
| | | | ACAAGGGCTTGAGTGGATGGGACGG | | AGGCAAAGCCCCCAAACTCATGATT |
| | | | ATCAACCCTAACAGTGGTGGCACAA | | TATGATGTCAGTAGTCGGCCCTCAG |
| | | | ACTATGCACAGAAGTTTCAGGGCAG | | GGGTTTCTAATCGCTTCTCTGGCTC |
| | | | GGTCATCATGACCAGGGACACGTCC | | CAAGTCTGGCAACACGGCCTCCCTG |
| | | | ATCACCACAGCCTTCATGGA | | ACCATCTCTGGGCTCCAGGCTGA |
| | | | GCTGACCAGACTGAGATATGACGAC | | GGACGAGGCTGATTATTACTGCAGC |
| | | | ACGGCCGTCTATTTCTGTGCGAGAG | | TCATATACAAGCAGCAACACTCTCG |
| | | | AGCCGATTGAAGGAGTAATAGGTGG | | TGGTATTCGGCGGAGGGACCAAGCT |
| | | | TATGATTGTGAACTACTACTACATG | | GACCGTCCTAG |
| | | | GACGTCTGGGGCAGAGGGACCACGG | | |
| | | | TCACCGTCTCCTCA | | |
| | C985 | 653 | CAGGTGCAGCTGGTGCAGTCTGGGG | 654 | CAGTCTGCCCTGACTCAGCCTGCCT |
| | | | CTGAGGTGAAGAAGCCTGGGGCCTC | | CCGTGTCTGGGTCTCCTGGACAGTC |
| | | | AGTGAAGGTCTCCTGCAAGGCTTCT | | GATCACCATCTCCTGCACTGGAACC |
| | | | GGATACATCTTCACCGGCTACTATA | | AGCAGTGACGTTGGTGGTTATAACT |
| | | | TGCACTGGGTGCGACAGGCCCCTGG | | ATGTCTCCTGGTACCAACAACACCC |
| | | | ACAAGGGCTTGAGTGGATGGGACGG | | AGGCAAAGCCCCCAAACTCATGATT |
| | | | ATCAACCCTAATAGTGGTGGCTCAA | | TATGATGTCACTAGTCGGCCCTCAG |
| | | | GGTATGCAGAGAAGTTCCAGGGCAG | | GGGTTTCTGATCGCTTCTCTGGCTC |
| | | | GGTCACCATGACCAGGGACACGTCC | | CAAGTCTGGCACCACGGCCTCCCTG |
| | | | ATCATCACAGCCTTCATGGAACTGA | | ACCATCTCTGGGCTCCAGGCTGAGG |
| | | | GGGGGCTGAAATCTGACGACACGGC | | ACGAGGCTGATTATTACTGCAGCTC |
| | | | CGTGTATTATTGTGCGAGAGAGCCG | | ATTTACAAGCGCCTTCACTCTCGTG |
| | | | ATTGAAGCAGTTCCTGCTGGTATAA | | GTTTTCGGCGGAGGGACCAAACTGA |
| | | | TTGTGAACTATTACTACATGGACGT | | CCGTCCTAG |
| | | | CTGGGGCAACGGGACCACGGTCACC | | |
| | | | GTCTCCTCA | | |
| | C986 | 655 | GAGGTGCAGCTGGTGCAGTCTGGAG | 656 | CAGTCTGTGCTGACGCAGCCGCCCT |
| | | | CAGAGGTGAAAAAGCCCGGGGAGAC | | CAGTGTCTGGGGCCCCAGAGCAGAG |
| | | | TCTGAAGATCTCCTGTAAGGGTTCT | | GGTCACCATCTCCTGCACTGGGTCC |
| | | | GGAGACAGTTTTAGCAATTATTGGA | | AGCTCCAACATCGGGGCAGGTCATG |
| | | | TCGGCTGGGTGCGCCAGAGTCCCGG | | ATGTACACTGGTACCAGCAGCTGCC |
| | | | GAAAGGCCTGGAGTGGATGGCGATC | | AGGAACAGCCCCCAAACTCCTCATC |
| | | | GTCTATCCTGGTGACTCTGATGCCA | | TATAATAACAACAATCGGCCCTCGG |
| | | | GATACAGTCCGTCGTTCCAAGGCCA | | GGGTCCCTGACCGATTCTCTGGCTC |
| | | | GGTCACTATCTCAGCGGACAAGTCC | | CAAGTCTGGCGCCTCGGCCTCCCTG |
| | | | GTCACCACCGCCTACTTGAAGTGGA | | GCCATCTCTGGGCTCCAGGCTGAAG |
| | | | GCAGCCTGAAGGCCTCGGACACCGC | | ATGAGGCTGAATATTACTGCCAGTC |
| | | | CATATATTATTGTGTGAGAGGATTA | | CTATGACAAGAGCCTGAGTGTCCTT |
| | | | CCAGTGGACTGGTACTTCGATCTCT | | TATGTCCTCGGAACTGGGACCAAGG |
| | | | GGGGCCGTGGCACCCTGGTCACCGT | | TCACCGTCCT |
| | | | CTCCTCAG | | |
| | C987 | 657 | CAGGTGCAGCTGCAGGAGTCGGGCC | 658 | TCCTATGAGCTGACTCAGCCACCCT |
| | | | CAGGACTGGTGAAGCCTTCGGAGAC | | CAGTGTCCGTGTCCCCAGGACAGGC |
| | | | CCTGTCCCTCACCTGTAATGTCTCT | | AGCCAGCATCACCTGCTCTGGAGAT |
| | | | GGTGACATCATCAATAAATATTACT | | AAATTGGGGGATAAATTTGCTTGCT |
| | | | GGAGCTGGATCCGGCAGTCCCCAGG | | GGTATCAGCAGAAGCCAGGCCAGTC |
| | | | GAAGGGACTGGAGTGGATTGGATAC | | CCCTGTCCTGGTCATCTATCAAAAT |
| | | | ATCTACTATAGTGGGACCACCTACT | | GACAAGCGGCCCACAGGGATCCCTG |
| | | | ACAATCCCTCCCTCAAGAGTCGAGT | | AGCGATTCTCTGGCTCCAACTCTGG |
| | | | CACCATGTCCGTGGGCACGTCCAAG | | GAACACAGCCACTCTGACCATCAGC |
| | | | CAGCAGTTCTCCTTGAGGCTGACCT | | GGGACCCAGGCTATGGATGAGGCTG |
| | | | CTGTGACCGCCGCAGATACGGCCGT | | ACTATTTCTGCCAGGCGTGGGACAG |
| | | | CTATTACTGTGCGAGGATGTTATCT | | TACCAGTGCTTCTGTCTTCGGAACT |
| | | | ACGGAGTGGTCATTTAACTGGTTCG | | GGGACCAAAGTCACCGTCCTAG |
| | | | ACCCCTGGGGCCCGGGAACCCTGGT | | |
| | | | CACCGTCTCCTCAG | | |
| | C989 | 659 | CAGGTGCAGCTGGTGCAGTCTGGGC | 660 | CAGTCTGTGCTGACGCAGCCGCCCT |
| | | | CTGAGGTGAAGAAGCCTGGGTCCTC | | CAGTGTCTGGGGCCCCAGGGCAGAG |
| | | | GGTGAAAGTCTCCTGCAAGGCCTCT | | GGTCACCATCTCCTGCACCGGGAGC |
| | | | GGAGGCAACTTCAACAGTTATACCA | | AGTTCCAATGTCGGGGCAGGTTATG |
| | | | TCACCTGGGTGCGACAGGCCCC | | ATGTACACTGGTACCAACAAC |
| | | | TGGACATGGGCTTGAGTGGATGGGA | | TTCCAGGGACAGCCCCCAAACTCCT |
| | | | CGGATCATCCCTACTCTTGGTGTAG | | CATCTATCGTAATAATAATCGGCCC |
| | | | CAAACTACGCACTGAACTTCCAGGA | | TCCGGGGTCCCTGACCGATTCTCTG |
| | | | CAGAATCACGATTACCGCGGACAAA | | GCTCCAAGTCTGGCTCCTCAGCCTC |
| | | | TCCACGAGCACAGCCTACATGGACC | | CCTGGACATCACTGGGCTCCAGGCT |
| | | | TGAGCAGCCTGAGATCTGAGGACAC | | GAGGATGAGGCTGATTATTACTGCC |
| | | | GGCCGTTTATTATTGTGCGAGAGAG | | AGTCCTATGACAGCAGCCTGAGTGA |
| | | | ACTGGATACAGTGGATTCCTTGCCG | | TTCGGTTTTCGGCGGAGGGACCAAG |
| | | | TCGCCTACATGGACGTCTGGGGCAA | | CTGACCGTCCT |
| | | | TGGGACCACGGTCACCGTCTCCTCA | | |
| | C990 | 661 | GAGGTGCAGCTGGTGGAGTCTGGGG | 662 | CAGTCTGCCCTGACTCAGCCTGCCT |
| | | | GAGGCTTGGTCCGGCCTGGGGGGTC | | CCGTGTCTGGGTCTCCTGGACAGTC |
| | | | CCTGAGACTCTCCTGTGCAGCCTCT | | GATCACCATCTCCTGCACTGGAACC |
| | | | GGATTCACCGTCGGTAGCAATTTCA | | AGCAGTGACGTTGGTGCTTATAACT |
| | | | TGAGCTGGGTCCGCCAGGCTCCAGG | | ATGTCTCTTGGCACCAACACCACCC |
| | | | GAAGGGGCTGGAGTGGGTCTCACTT | | AGGCAAAGCCCCCAAACTCATTATT |
| | | | ATTTATAGCGGTGGTGGCACACACT | | TATGACGTCAGTAATCGGCCCTCAG |
| | | | ACGCAGAGTCCGTGAAGGGCCGATT | | GGGTTTCTAATCGCTTCTCTGGCTC |
| | | | CACCATCTCCAGAGACAAATCCAAG | | CAAGTCTGGCAACACGGCCTCCCTG |
| | | | AACACACTGTATCTTCAAATGAACA | | ACCATCTCTGGGCTCCAGGCTGAGG |
| | | | GCCTGAGAGCTGAGGACACGGCTGT | | ACGAGGCTGATTATTATTGCACCTC |
| | | | TTATTACTGTGCGAACCAGGGCTAC | | ATATACAAACACCACCACTCCCTGG |
| | | | TACTATTACATGGACGTCTGGGGCA | | GTGTTCGGCGGAGGGACCAAGTTGA |
| | | | AAGGGACCACGGTCACCGTCTCC | | CCGTCCTAG |
| | C991 | 663 | CAGGTGCAGCTGCAGGAGTCGGGCC | 664 | TCCTATGAGCTGACTCAGCCACCCT |
| | | | CAGGACTGGTGAAGCCTTCACAGAC | | CGGTGTCAGTGGCCCCAGGACAGAC |
| | | | CCTGTCCCTCACCTGCACTGTCTCT | | GGCCAGGATTACCTGTGGGGGAAAC |
| | | | GGTGGCTCCATCAGCAGTGGTGGTT | | AACATTGGAAGTAAAAGTGTGCACT |
| | | | ACTTCTGGAGCTGGATCCGCCAGCA | | GGTACCAGCAGAAGCCAGGCCAGGC |
| | | | CCCAGGGAAGGGCCTGGAGTGGCTT | | CCCTGTGATGGTCGTCTATGATGAT |
| | | | GGGTACAATTATTACACTGGGACCC | | AGTGACCGGCCCTCAGGGATCCCTG |
| | | | CCCACTACAATCCGTCCCTCAAGAG | | AGCGATTCTCTGGCTCCAACTCTGG |
| | | | TCGCCTTGTTATATCCATAGACACG | | GGACACGGCCACCCTCACCATCAGC |
| | | | TCTAAGAACCAGTTCTCCCTGAAGC | | AGGGTCGAAGCCGGGGATGAGGCCG |
| | | | TGAGCTCTGTGACTGCCGCGGACAC | | ACTATTCCTGTCAGGTGTGGGATAG |
| | | | GGCCGTGTATTACTGTGCGAGGGGC | | AAGTAGTGACCATCCTTGGGTGTTC |
| | | | GACACATTTGGGCGAGGGTATTATT | | GGCGGAGGGACCAAGCTGACCGTCC |
| | | | TTGACTACTGGGGCCAGGGAACCCT | | TAG |
| | | | GGTCACCGTCTCCTCAG | | |
| | C992 | 665 | CAGGTGCAGCTGCAGGAGTCGGGCC | 666 | TCCTATGAGCTGACTCAGCCACCCT |
| | | | CAGGACTGGTGAAGCCTTCACAGAC | | CGGTGTCAGTGGCCCCAGGACAGAC |
| | | | CCTGTCCCTCACCTGCACTGTCTCT | | GGCCAGGATTACCTGTGGGGGAAAC |
| | | | GGTGGCTCCATCAGCAATGGTGGTT | | AACATTGGAACTAATAGTATGCACT |
| | | | ACTTCTGGACCTGGATCCGCCAGCA | | GGTACCAGCAGAAGCCAGGCCAGGC |
| | | | CCCAGTGAAGGGCCTGGAGTGGATT | | CCCTGTGCTCGTCGTCTTTGATGAT |
| | | | GGATACATCTATTACAGTGGGAGCC | | AGCGACCGGCCCTCAGGGATCCCTG |
| | | | CCCACTACAACCCGTCCCTCAAGAG | | AGCGCTTCTCTGGCTCCAACTCTGG |
| | | | TCGACTTTCCATATCACTGGACACA | | GAACACGGCCACCCTGACCATCAGC |
| | | | TTTAAGAACCAGTTCTCCCTGAATC | | AGGGTCGAAGCCGGGGATGAGGCCG |
| | | | TCAGCTCTGTGACTGCCGCGGACAC | | ACTATCACTGTCAGGTGTGGGATCG |
| | | | GGCCGTGTATTACTGTGCGAGGGGC | | GAGTAGTGACCGTCCTTGGGTGTTC |
| | | | GATACATTTGGGCGAGGCTACTACT | | GGCGGAGGGACCAAGCTGACCGTCC |
| | | | TTGACTTCTGGGGCCAGGGAACCCT | | TAG |
| | | | GGTCACCGTCTCCTCA | | |
| | C993 | 667 | GAGGTGCAGCTGTTGGAGTCTGGGG | 668 | CAGTCTGCCCTGACTCAGCCTCCCT |
| | | | GAGGCTTGGTACAGCCTGGGGGGTC | | CCGCGTCCGGGTCTCCTGGACAGTC |
| | | | CCTAAGACTCTCCTGTGCAGCCTCT | | AGTCACCATCTCCTGCACTGGAACC |
| | | | GGATTCCCCTTTAGCATCTATGCCA | | AGCGGAGACGTTGGTGGTTATAACT |
| | | | TGAGCTGGGTCCGCCAGGCTCCTGG | | ATGTCTCCTGGTACCAACAGCACCC |
| | | | GAAGGGGCTGGAGTGGGTCTCAGGT | | AGGCAAAGCCCCCAAACTCATGATT |
| | | | ATGCGTGGCACTACTGGTACCACAT | | TATGAGGTCAGTAAGCGGCCCTCAG |
| | | | ACTACGCCGACTCCGTGAAGGGCCG | | GGGTCCCTGATCGCTTCTCTGGCTC |
| | | | GTTCGCCATCTCCAGAGACAATTCC | | CAAGTCTGGCAACACGGCCTCCCTG |
| | | | AAGAATATGCTGCATCTGCAAATGA | | ACCGTCTCTGGGCTCCAGGCTGAAG |
| | | | ACAGCCTGAGAGCCGAGGACACGGC | | ATGAGGCTGATTATTACTGCAACTC |
| | | | CGTGTATTACTGTGCGAAAAGTGAC | | ATATGCAGGCAGCAACAATTGGGTG |
| | | | CACGGTGACTACGTCATTGGCGCTT | | TTCGGCGGAGGGACCAAGCTGACCG |
| | | | TTGATATCTGGGGCCAGGGGACAAT | | TCCTAG |
| | | | GGTCACCGTCTCTTCAG | | |
| | C994 | 669 | CAGGTGCAGCTGCAGGAGTCGGGCC | 670 | GACATCCAGATGACCCAGTCTCCAT |
| | | | CAGGACTGGTGAAGCCTTCGGGGAC | | CCTCCCTGTCTGCATCTGTTGGAGA |
| | | | CCTGTCCCTCACCTGCGCTGTCTCT | | CAGAGTCACCATCACTTGCCGGGCA |
| | | | GGTGTCTCCATCAGCAATACTAACT | | AGTCAGAGCATTACCGACCATTTAA |
| | | | GGTGGAATTGGGTCCGCCAGCCCCC | | ATTGGTATCAGCAAAAACCAGGGAA |
| | | | CGGGAAGGGGCTGGAGTGGATTGGG | | AGCCCCCAAACTCCTGATCTATGCT |
| | | | GAAATCTATCATACTGGGAGCGCTA | | GCATCCAGTTTGCAAACTGGAGTCC |
| | | | GATACAACCCGTCCCTCAGGAGTCG | | CATCCAGGTTCAGTGGCAGTGGATC |
| | | | AGTCACCATATCAGTTGACAAGTCG | | TGAGACAGATTTCACTCTCACCATC |
| | | | AAGAATCAGTTCTCCCTGAGGCTGA | | AGCACTCTGCAGCCTGAAGATTTTG |
| | | | ACTCAGCGACCGCCGCGGACACGGC | | CGACTTACTACTGTCAACAGAGTTA |
| | | | CATATATTACTGTGCGAGAGCCCAG | | CGGTCCCCCGACGTACTCTTTTGGC |
| | | | ACTCCTGAGTTCGGGGAGTTGTTAT | | CAGGGGACCAAGCTGGAGATCAAAC |
| | | | ACTGGGGCCAGGGAGCCCTGGTCAC | | |
| | | | CGTCTCCTCAG | | |
| | C995 | 671 | GAGGTGCAGCTGGTGGAGTCTGGGG | 672 | GAAATAGTGATGACGCAGTCTCCAG |
| | | | GGGGCTTGATACAGCCTGGGCGGTC | | CCACCCTGTCTGTGTCTCCAGGGGA |
| | | | CCTGAGACTCTCCTGTACAGCTTCT | | AAGAGCCACCCTCTCCTGCAGGGCC |
| | | | GGATTCTCCGTCGGTGATTACGCTA | | ACTGAGAGTGTTTACAGCAATTTGG |
| | | | TGAGCTGGTTCCGCCAGGCTCCAGG | | CCTGGTATCAGCAGAAACCTGGCCA |
| | | | AAAGGGGCTGGAGTGGGTAGGTTTC | | GGCTCCCAGGCTCCTCATGTATGAT |
| | | | CTTAGAAATCAACATTACGGTGGGA | | GCATCCACCAGGGCCCCTGGTATCC |
| | | | CAGCAGAATACGCCGCGTCTGTGAA | | CAGCCAGGTTCAGTGGCAGTGGGTC |
| | | | AGGCAGATTCTCCATCTCTACAGAC | | TGGGACAGAGTTCACTCTCACCATC |
| | | | GCTTCCAAAAACATCGTCTATCTGC | | AGCAGCCTGCAGTCTGAAGATTTTG |
| | | | AAATGGACAGCCTGAAAACCGAGGA | | CAACTTATTACTGTCAACAATATAG |
| | | | CACAGCCGTTTATTACTGTGCTCGA | | TAACTGGCCTCCGATCACCTTCGGC |
| | | | AACGACCGTTATATTGTGATAGTTC | | CAAGGGACACGACTGGAGATTAAAC |
| | | | CAGCTGAAATGCTCTACTGGGGCCA | | |
| | | | GGGAACCCTGGTCACCGTCTCCTCA | | |
| | | | G | | |
| | C996 | 673 | GAGGTGCAGCTGGTGGAGTCTGGGG | 674 | TCCTATGAGCTGACTCAGCCACCCT |
| | | | GAGGCTTGGTCCAACCGGGGGGGTC | | CGGTGTCAGTGGCCCCAGGACAGAC |
| | | | CCTGAGACTCTCCTGTGTAGCCTCT | | GGCCAGGATTACCTGTGGGGGGAAC |
| | | | GGATTCACCTCCACTAACTACGACA | | AACATTGGAAATAAAAGTGTGTATT |
| | | | TGCACTGGGTCCGCCAGGCTCCAGG | | GGTACCAGCAGAAGCCAGGCCAGGC |
| | | | AAGAGGTCTGCAGTGGGTCTCGAGT | | CCCTGTTCTGGTCGTCTATGATGAT |
| | | | ATTGGAACTGCTGGTGACACATACT | | AGCGGCCGGCCCTCAGGGATCCCTG |
| | | | ATCCAGGCTCCGTGAGGGGCCGATT | | AGCGATTCTCTGGCTCCAACTCTGC |
| | | | CACCATCTCCAGAGAAAATGCCAAG | | GAACACGGCCACCCTGACCATCAGC |
| | | | AACTCCTTGGATCTTCAAATGAACA | | AGGGTCGAAGCCGGGGATG |
| | | | GCCTGAGAGTCGGGGACACGGCTGT | | AGGCCGACTATTACTGTCAGGTGTG |
| | | | TTATTACTGTGC | | GGATAATAATAGTGATCAGTTCGGC |
| | | | AAGAGGCCAGAGGGGGTATTACGAT | | GGAGGGACCAAGCTGACCGTCCTAG |
| | | | AGAAGTGGTTATTACTGGGGTTGGA | | |
| | | | GGGCTTTTGATATTTGGGGCCAAGG | | |
| | | | GACAATGGTCACCGTCTCTTCAG | | |
| coV72 | C997 | 675 | GAGGTGCAGCTGTTGGAGTCTGGGG | 676 | GAAATTGTGTTGACGCAGTCTCCAG |
| | | | GAGGCTTGGTACAGCCTGGGGGGTC | | GCACCCTGTCTTTGTCTCCAGGGGA |
| | | | CCTGAGACTCTCCTGTGCAGCCTCT | | AAGAGGCACCCTCTCCTGCAGGGCC |
| | | | GGATTCACCTTTAGCAAGGATGCCA | | AGTCAGCGTGTTCCCAGCAGCCAGT |
| | | | TGAGCTGGGTCCGCCAGGCTCCAGG | | TAGCCTGGTACCAGCAGAAATCTGG |
| | | | GAAGGGGCTGGAGTGGGTCTCAACT | | CCAGGCTCCCAGGCTCCTCATCTAT |
| | | | GTAACTGGTAGTGGTACTAACACAT | | GGTGCATCTAGCAGGGCCAGTGGCA |
| | | | ACTACGCAGACTCCGTGAAGGGCCG | | TCCCAGACAGGTTCAGTGGCAGTGG |
| | | | GTTCACCATCTCCAGAGACAATTCC | | GTCTGGGACAGACTTCACTCTCAAC |
| | | | AATAACACGCTGTATCTGCAAATGA | | ATCAGCAGACTGGAGCCTGAAGATT |
| | | | ACAGCCTGAGAGCCGAGGACACGGC | | TTGCAGTGTATTACTGTCAGCAGTA |
| | | | CGTATATTACTGTGCGAACCACCCT | | TGGTAGCTTAAGGGCGCTCACTTTC |
| | | | TTAGGAGCAGCCGAGGGCTACTACT | | GGCGGAGGGACCAAGGTGGAGATCA |
| | | | ACTACTACATGGACGTCTGGGGCAA | | AAC |
| | | | AGGGACCACGGTCACCGTCTCCTCA | | |
| | C998 | 677 | CAGGTGCAGCTGGTGCAGTCTGGGG | 678 | GACATCCAGATGACCCAGTCTCCTT |
| | | | CTGAGGTGAAGAAGCCTGGGGCCTC | | CCACCCTGTCTGCATCTGTAGGAGA |
| | | | AGTGAAAGTTTCCTGCAAGACATCT | | CAGAGTCACCATCACTTGCCGGGCC |
| | | | GGATACACCTTCATTAGTTACTATA | | AGTCAGAGTATTAGTAACTGGTTGG |
| | | | TACACTGGGTGCGACAGGCCCCTGG | | CCTGGTATCAGCAGAAACCAGGGAA |
| | | | ACAAGGGCTTGAGTGGATGGGAATA | | AGCCCCTAAGCTCCTGATCTATAAG |
| | | | ATCAACCCTGATGGTGATAACACAA | | GCGTCTAGTTTAGAGAGTGGGGTCC |
| | | | ACTACGCACAGAAGTTCCAGGGCAG | | CATCAAGGTTCAGCGGCAGTGGATC |
| | | | AGTCACCATGACCAGGGACACGTCC | | TGGGACAGAATTCACTCTCACCATC |
| | | | ACGAGCACAGTCTACATGGAGCTGA | | AGCAGCCTGCAGCCTGATGATTTTG |
| | | | GTAGTCTGAGATTTGAGGACACGGC | | CAACTTATTACTGCCAAGAGTATAA |
| | | | CGTGTATTACTGTGCGAGAGGGGGT | | TAGTTATTATTTTGGCCAGGGGACC |
| | | | GCGATACCAGCCCTAAGGACTGCTT | | AAGCTGGAGATCAAAC |
| | | | TTGATATCTGGGGCCAAGGGACAAT | | |
| | | | GGTCACCGTCTCTTCAG | | |
| | C999 | 679 | CAGGTGCAGCTGGTGCAGTCAGGGG | 680 | GACATCCAGATGACCCAGTCCCCTT |
| | | | CTGAAGTGAGGAGGCCTGGGGCCTC | | CCACCCTGTCTGCATCTGTAGGAGA |
| | | | AGTGAAAGTTTCCTGTAAGGCATCT | | CAGAGTCACCATCACTTGCCGGGCC |
| | | | GGATACACCCTCACCCACTACTATA | | AGTCAGAGTATTAATAACTGGTTGG |
| | | | TACACTGGGTGCGACAGGCCCCTGG | | CCTGGTATCAGCAGAAACCAGGGAA |
| | | | ACAAGGGCTTGAGTGGGTGGGAATA | | AGCCCCTAAGCTCCTGATCTATAAG |
| | | | ATCAACCCTGATGGTGATAACACAA | | GCGTCTACTTTAGAAAGTGGGGTCC |
| | | | ACTACGCACAGAAGTTCCAGGGCAG | | CATCAAGGTTCAGCGGCAGTGGATC |
| | | | AGTCACCATGACTAGGGACACGTCC | | TGGGACAGAATTCACTCTCACCATC |
| | | | ACGAGCACAGTCTACATGGAACTGA | | AGCAGCCTGCAGCCTGATGATTTTG |
| | | | GCAGCCTGAGATCTGAGGACACGGC | | CAACTTATTACTGCCAACAGTATAA |
| | | | CATATTTTACTGTGCGAGAGGGGGT | | TAGTTATTTTTTTGGCCAGGGGACC |
| | | | GCAATACCAGCCCTAAGGTCTGCTT | | AAGCTGGAGATCAAAC |
| | | | TTGATATCTGGGGCCAGGGGACAAT | | |
| | | | GGTCACCGTCTCTTCAG | | |
| | C1000 | 681 | CAGGTGCAGCTGCAGGAGTCGGGCC | 682 | CAGTCTGCCCTGACTCAGCCTCGCT |
| | | | CAGGACTGGTGAAGCCTTCACAGAC | | CAGTGTCCGGGTCTCCTGGACAGTC |
| | | | CCTGTCCCTCAGTTGTACTGTCTCT | | AGTCACCATCTCCTGCACTGGAACC |
| | | | GGTGGCTCCATCAGTAGTGATGATT | | AGCAGTGATGTTGGTGGTTATAGCT |
| | | | ACTACTGGAGTTGGATCCGCCAGCC | | TTGTCTCCTGGTACCAACAGCACCC |
| | | | CCCAGGGAAGGGCCTGGAGTGGATT | | AGGCAAAGCCCCCAAAGTCCTGATT |
| | | | GGGTACATCTACTA | | TATGATGTCGATAAG |
| | | | CAGTGGGAGCACGTACTACAATTCG | | CGGCCCTCAGGGGTCCCTGATCGCC |
| | | | TCCCTCAAGAGTCGAGTTAGCATAT | | TCTCTGGCTCCAAGTCTGGCAACAC |
| | | | CAGTAGACACGTCCAAGAACCAGTT | | GGCCTCCCTGACCATCTCTGGGCTC |
| | | | CTCCCTGAAGCTGAGCTCTGTGACT | | CAGGCTGAGGATGAGGCTGATTATT |
| | | | GCCGCAGACACGGCCGTGTATTACT | | ACTGCTGCTCATATGCAGGCAGCTA |
| | | | GTGCCAGATGGAAAAGATGGCTACA | | CACTTTGATATTCGGCGGAGGGACC |
| | | | GTTCCTTTATTTTGACTATTGGGGC | | AAGCTGACCGTCCTAG |
| | | | CAGGGAACCCTGGTCACCGTCTCCT | | |
| | | | CAG | | |
| | C1001 | 683 | CAGGTGCAGCTGCAGGAGTCGGGCC | 684 | CAGTCTGCCCTGACTCAGCCTCGCT |
| | | | CAGGACTGGTGAAGCCTTCACAGAC | | CAGTGTCCGGGTCTCCTGGACAGTC |
| | | | CCTGTCCCTCACCTGCACTGTCTCT | | AGTCACCATTTCCTGCACTGGAACT |
| | | | GGTGGCTCCATCAGCAGTGGTGATT | | AGCAGTGATGTTGGTAGTTATGACT |
| | | | ACTACTGGACTTGGATCCGCCAGCC | | ATGTCTCCTGGTACCAACAGCACCC |
| | | | CCCAGGGAAGGGCCTGGAGTGGATT | | AGGCAAAGCCCCCAAAGTCATGATT |
| | | | GGGTACATCTTTTACAGTGGGATCA | | TATGGTGTCGATGAGCGGCCCTCAG |
| | | | CCTACTACAGCCCGTCCCTCAAGAG | | GGGTCCCTCATCGCTTCTCTGGCTC |
| | | | TCGACTTACCATGTCAATAGACACG | | CAAGTCTGGCAACACGGCCTCCCTG |
| | | | TCCAAGAGCCAATTCTCCCTGAACC | | ACCATCTCTGGGCTCCAGGCTGACG |
| | | | TGAGCTCTGTCACTGCCGCAGACAC | | ATGAAGCTGATTATTTCTGCTGCTT |
| | | | GGCCGTGTATTACTGTGCCAGATGG | | TTATGCAGGCAGCTACACTTTATTA |
| | | | AAAAGATTGCTACAATCCCTTCACT | | TTCGGCGGAGGGACCAAGGTGACCG |
| | | | TTGACTACTGGGGCCAGGGAATCCT | | TCCTAG |
| | | | GGTCACCGTCTCCTCAG | | |
| | C1002 | 685 | GAGGTGCAGCTGGTGGAGTCTGGGG | 686 | GACATCCAGATGACCCAGTCTCCAT |
| | | | GAGGGTTGGTCCAGCCGGGGGGGTC | | CCTCCCTGTCTGCATCTGTAGGCGA |
| | | | CCTGAGACTCTCCTGTGCAGCCTCT | | CAGAGTCACCATCACTTGCCAGGCG |
| | | | GAATTCATCGTTAGTAGCAACTACA | | AGTCAGGACATCAACAACTATTTAA |
| | | | TGACCTGGGTCCGCCAGGCTCCAGG | | ATTGGTATCAGCAGAAACCAGGGAA |
| | | | GAAGGGGCTGGAGTGGGTCTCAATT | | AGCCCCTAAGCTCCTGATCTACGAT |
| | | | ATGTATCCCGGTGGTTCCACATTCT | | GCATCTAATTTGGAAACAGGGGTCC |
| | | | ACGCAGACTCCGTGAAGGGCAGATT | | CATCAAGGTTCAGTGGAAGTGGATC |
| | | | CACCATCTCCAGAGACAATTCCAAG | | TGGGACAGATTTTTCTTTCACCATC |
| | | | AACACGTTGTATCTTCAAATAAATA | | AGCAGCCTGCAGCCTGAAGATATTG |
| | | | GGCTGAGAGCCGAGGACACGGCTGT | | CAACATATTACTGTCAACAGTATGA |
| | | | ATATTACTGTGCGAGAGATATAGCA | | TAATCTCTCTCGACTCACTTTCGGC |
| | | | GGTCGTCTTGACTACTGGGGCCAGG | | GGAGGGACCAAGGTGGAAATCAAAC |
| | | | GAACCCTGGTCACCGTCTCCTCAG | | |
| | C1003 | 687 | CAGGTGCAGCTGGTGGAGTCTGGGG | 688 | GACATCCAGATGACCCAGTCTCCAT |
| | | | GAGGCGTGGTCCAGCCTGGGAGGTC | | CCTCCCTGTCTGCATCTGTAGGAGA |
| | | | CCTGAGACTCTCCTGTGCAGCCTCT | | CAGAGTCACCATCACGTGCCAGGCG |
| | | | GGATTCGCCTTCAGTAGCTATGGCA | | AGTCAGGACATTAGCAACTATTTAA |
| | | | TGAACTGGGTCCGCCAGGCTCCAGG | | ATTGGTATCAGCAGAAGCCAGGGAA |
| | | | CAAGGGGCTGGAGTGGGTGACTACT | | AGCCCCTAAGCTCCTGATCTACGAT |
| | | | GTATCATCTGATGGAAATGTTAATT | | GCATCCAATTTGGAAACAGGGGTCC |
| | | | ACTATATAGATTCCGTGAAGGGCCG | | CATCAAGGTTCAGTGGGAGTGGATC |
| | | | ATTCACCATCTCCAGAGACAATTCC | | TGGGACAGATTTTACTTTCACCATC |
| | | | AAGAACACGCTGTATCTGCAAATGA | | ACCAGCCTGCAGCCTGAAGACATTG |
| | | | ACAGCCTGAGAGGTGACGACACGGC | | CAACATATTACTGTCAACAGTATGA |
| | | | AGTGTATTACTGTGCGAAAGGCCCC | | TAATCTCCCGATCACCTTCGGCCAA |
| | | | CGGTTTGGCTGGAGCTATAGAGGGG | | GGGACACGACTGGAGATTAAAC |
| | | | GGTCTGGTTTTGATATCTGGGGCCA | | |
| | | | AGGGACAATGGTCACCGTCTCTTCA | | |
| | | | G | | |
| | C1004 | 689 | CAGGTGCAGCTGGTGCAGTCTGGGG | 690 | CAGTCTGCCCTGACTCAGCCTGCCT |
| | | | CTGAGGTGAAGAAGCCTGGGGCCTC | | CCGTGTCTGGGTCTCCTGGACAGTC |
| | | | AGTGAAGGTTTCCTGCAAGGCATCT | | GATCACCATCTCCTGCACTGGAACC |
| | | | GGATAC | | AGCAGGG |
| | | | TCCTTCGCCACCTACTATATACACT | | ACATTGGTTTTTATAAGTATGTCTC |
| | | | GGGTGCGACAGGCCCCTGGACAAGG | | CTGGTACCAACAACACCCAGGCAAA |
| | | | GCTTGAGTGGATGGGAATAATCGAC | | GCCCCCAAACTCATCATTTATGATG |
| | | | CCTAGTGGTGGTAGTACAAACTACG | | TCACTAATCGGCCCTCAGGGGTTTC |
| | | | CACAGAAGTTCCAGGGCAGAGTCAC | | TAATCGCTTCTCTGGCTCCAAGTCT |
| | | | CATGACCAGGGACACGTCGACGAGC | | GGCAACACGGCCTCCCTGACCATCT |
| | | | ACAGTGTACTTGGAGCTGAGCAGCC | | CTGGGCTCCAGGCTGAGGACGAGGC |
| | | | TGAGATCCGAGGACACGGCCGTCTA | | TCATTATCACTGCAGCTCATATTCA |
| | | | TTACTGTGCGAGAGCCGACACCCCC | | ACCGCCTACGTCCATGTGCTTTTCG |
| | | | ATAGTAGTGGATACTACGTCCTATT | | GCGGAGGGACCAGGCTGACCGTCCT |
| | | | TCTACTACATGGACGTCTGGGGCAA | | AG |
| | | | AGGGACCACGGTCACCGTCTCCTCA | | |
| | C1006 | 691 | CAGGTGCAGCTGGTGCAGTCTGGGG | 692 | GACATCCAGATGACCCAGTCTCCAT |
| | | | CTGAAGTGAGGAAGCCTGGGTCCTC | | CCTCACTGTCTGCATCTATAGGAGA |
| | | | GGTGAAGGTCTCCTGCAAGGCTTCT | | CAGAGTCACCATCACTTGTCGGGCG |
| | | | GGAGGCCCCTTCGACCAGTATACTT | | AGTCAGGGCATTAGCTATTATCTAG |
| | | | TCAGTTGGGTGCGACAGGCCCCTGG | | CCTGGTTTCAGCAGAAACCAGGGGA |
| | | | ACAAGGACTTGAGTGGATGGCAAGG | | AGCCCCTAGGTCCCTGATCTATGAT |
| | | | ATCACACCTGTTGTTGATTTGACAA | | GCATCCAGTTTGCAAAGTGGGGTCC |
| | | | ATTACGCACAGAAATTCCAGGGCAG | | CATCAAAGTTCAGCGGCAGTGGATC |
| | | | AATCACCATTATCACGGACAAATCT | | TGGGACAGATTTCACTCTCACCATC |
| | | | ACGAGCACAGCCTACATGGAGCTGA | | AGCAGCCTGCAGCCTGAAGATTCTG |
| | | | GCAGCCTGAGATCTGAGGACACGGC | | CAACTTATTACTGCCAACAATATAA |
| | | | CATATATTACTGTGCGACTCCCCTC | | TAGTTACCCTCTCACTTTCGGCGGA |
| | | | AATGATTACTATGCTTCGGGGAACC | | GGGACCAAGGTGGAAATCAAAC |
| | | | TCGGCCTCTGGGGCCAGGGAACCCT | | |
| | | | GGTCACCGTCTCCTCAG | | |
| | C1007 | 693 | CAGGTGCAGCTGGTGCAGTCTGGGT | 694 | GACATCCAGATGACCCAGTCTCCAT |
| | | | CTGAGATGAAGAAGCCTGGGTCCTC | | CCTCACTGTCTGCATCTATAGGAGA |
| | | | GGTGAAGGTCTCCTGCAAGGCTGCA | | CACAGTCACCATCACTTGTCGGGCG |
| | | | GGAGGCACCCTCAACACCCATACTT | | AGTCAGGGTATTAGTTATTATCTAG |
| | | | TCAGTTGGGTGCGACAGGCCCCTGG | | CCTGGTTTCAGCGGAAACCAGGGAA |
| | | | ACAAGGACTTGAGTGGATGGGAAGG | | AGCCCCTAAGTCCCTGATCTATGAT |
| | | | ATCACACCCACTGTAGATCTGACAA | | GCATCCAGCTTGCAAAGTGGGGTCC |
| | | | ATTACGCACAGAAGTTCCAGGGCAG | | CATCAAAGTTCAGCGGTAGTGGATC |
| | | | AATCACGATTACCGCGGACACATCC | | CGGGACAGATTTCACTCTCACCATC |
| | | | ACGAACACAGCCTACCTGGAACTGA | | AGCAGCCTGCAGCCTGAAGATTCTG |
| | | | GGCGTCTGAGATCTGAGGACACGGC | | CAACTTATTACTGCCAACAATATAG |
| | | | CATTTATTACTGTGCGACTCCCCTC | | TACTTATCCTCTCACTTTCGGCGGA |
| | | | AATGACTATTATGCTTCGGGAAACC | | GGGACCAAGGTGGAAATCAAAC |
| | | | TCGGCTTATGGGGCCAGGGAACCCT | | |
| | | | GGTCACCGTCTCCTCAG | | |
| | C1008 | 695 | GAGGTGCAGCTGGTGGAGTCTGGAG | 696 | CAGTCTGCCCTGACTCAGCCTGCCT |
| | | | GAGGCTTGATCCAGCCTGGGGGGTC | | CCGTGTCTGGGTCTCCTGGACAGTC |
| | | | CCTGAGACTCTCCTGTGCAGCCTCT | | GATCACCATCTCCTGCACTGGAACC |
| | | | GGGTTCACCGTCAGTAGCAACTACA | | AGCAGTGATGTTGGGAGTTATAACC |
| | | | TGAGCTGGGTCCGCCAGGCTCCAGG | | TTGTCTCCTGGTACCAACAGCACCC |
| | | | GAAGGGGCTGGAGTGGGTCTCAGTT | | AGGCAAAGCCCCCAAACTCATGATT |
| | | | ATTTATAGCGGTGGTAGCACATACT | | TATGAGGTCAGTAAGCGGCCCTCAG |
| | | | ACGCAGACTCCGTGAAGGGCCGATT | | GGGTTTCTAATCGCTTCTCTGGCTC |
| | | | CACCATCTCCAGAGACAATTCCAAG | | CAAGTCTGGCAACACGGCCTCCCTG |
| | | | AACACGCTGTATCTTCAAATGAACA | | ACAATCTCTGGGCTCCAGGCTGAGG |
| | | | GCCTGAGAGCCGAGGACACGGCCGT | | ACGAGGCTGATTATTACTGCTGCTC |
| | | | GTATTACTGTGCGAGAGTTGTGGGT | | ATATGCAGGTAGTAGCACTTGGGTG |
| | | | TACGATTTTTGGAGTGGTTATGATG | | TTCGGCGGAGGGACCAAGCTGACCG |
| | | | GAG | | TCCTAG |
| | | | GTTACTTTGACTACTGGGGCCAGGG | | |
| | | | AACCCTGGTCACCGTCTCCTCAG | | |
| | C1009 | 697 | GAGGTGCAGCTGGTGGAGTCTGGAG | 698 | CAGTCTGCCCTGACTCAGCCTGCCT |
| | | | GAGGCTTGCTCCAGCCTGGAGGGTC | | CCGTGTCTGGGTCTCCTGGACAGTC |
| | | | CCTGAGACTCTCCTGTGCAGCCTCT | | GATCACCATCTCCTGCACTGGAACC |
| | | | GGCTTCAGCGTCAGTAGCAACTACA | | AGCAGTGATATTGGGAATTATAATC |
| | | | TGACCTGGGTCCGCCAGGCTCCAGG | | TTGTCTCCTGGTACCAACAGCACCC |
| | | | GAAGGGGCTGGAGTGGGTCGCAGCT | | AGGCAAAGCCCCCAAACTCATGATT |
| | | | ATTTACAGCGGTGACAGTACATACT | | TATGACGTCAGTAAGCGGCCCTCAG |
| | | | ACGTAGACTCCGTGAAGGGCCGATT | | GAGTTTCTAATCGCTTCTCTGGCTC |
| | | | CATCATCTCCAGAGACAATTCCAAG | | CAAGTCTGGCAACACGGCCTCCCTG |
| | | | AACACGGTTTATCTTCACTTGAGTA | | ACAATCTCTGGGCTCCAGGCTGAGG |
| | | | GCCTGAGAGCCGAGGACACGGCCGT | | ACGAGACTGATTATTACTGCTGCTC |
| | | | ATATTACTGTGCGAGACTTGTGGGT | | ATATGCAGGTAGCAGCACTTGGGTG |
| | | | TACGATTTTCGGAGTGGTTCTGATG | | TTCGGCGGAGGGACCAAGTTGACCG |
| | | | GCGGTTATTTTGACTACTGGGGCCA | | TCCTAG |
| | | | CGGAACCCTGGTCACCGTCTCCTCA | | |
| | | | G | | |
| | C1010 | 699 | CAGGTGCAGCTGGTGGAGTCTGGGG | 700 | GACATCCAGATGACCCAGTCTCCAT |
| | | | GAGGCGTGGTCCAGCCTGGGAGGTC | | CCTCCCTGTCTGCATCTCTAGGAGA |
| | | | CCTGAGACTCTCCTGTGCAGCCTCT | | CAGAGTCACCATCACTTGCCAGGCG |
| | | | GGATTCACCTTCAGTAGCTATGCTA | | AGTCAGGACATTAGCAACTATTTAA |
| | | | TGCACTGGGTCCGCCAGGCTCCAGG | | ATTGGTATCAGCAGAAACCAGGGAA |
| | | | CAAGGGGCTGGAGTGGGTGGCAGTT | | AGCCCCTAAGCTCCTGATCTACGAT |
| | | | ATATCATATGATGGAAGCAATAAAT | | GCATCCAATTTGGAAACAGGGGTCC |
| | | | ACTACGCAGACTCCGTGAAGGGCCG | | CATCAAGGTTCAGTGGAAGTGGATC |
| | | | ATTCACCATCTCCAGAGACAATTCC | | TGGGACAGATTTTACTTTCACCATC |
| | | | AAGAACACGCTGTATCTGCAAATGA | | AGCAGCCTGCAGCCTGAAGATATTG |
| | | | ACAGCCTGAGAGCTGAGGACACGGC | | CAACATATTACTGTCAACAGTATGA |
| | | | TGTGTATTACTGTGCGAAAAAGGGT | | TAATCTCCCTCCGATCACCTTCGGC |
| | | | CAACCATATTGTGGTGGTGATTGCT | | CAAGGGACACGACTGGAGATTAAAC |
| | | | ATTTCTACTACTTTGACTACTGGGG | | |
| | | | CCAGGGAACCCTGGTCACCGTCTCC | | |
| | | | TCAG | | |
| | C1011 | 701 | CAGGTGCAGCTGGTGGAGTCGGGGG | 702 | GACATCCAGATGACCCAGTCTCCAT |
| | | | GAGGCGTGGTCCAGCCTGGGAGGTC | | CCTCCCTGTCTGCATCTGTAGGAGA |
| | | | CCTGAGACTCTCCTGTGCAGTCTCT | | CAGAGTCACCATCACTTGCCAGGCG |
| | | | GGATTCACCTTCAGTCACTATGCTA | | AGTCAGGACATTAGCAATCATTTAA |
| | | | TGCACTGGGTCCGCCAGGCTCCAGG | | ATTGGTATCAGCAGAAACCAGGGAA |
| | | | CAAGGGGCTGGAGTGGGTGGCAGTT | | AGCCCCTAAGCTCCTGATCTACGAT |
| | | | ATATCATATGATGGAGCCGATAAAT | | GCATCCAATTTGGAAACAGGGGTCC |
| | | | ACTACGCAGACTCCGTGAGGGGCCG | | CCTCAAGGTTCAGTGGAAGTGGATC |
| | | | ATTCACCATCGCCAGAGACAATTCC | | TGGGACAGATTTTACTTTCACCATC |
| | | | AAGAACACTCTGTTTCTGCAAATGA | | AGCAGCCTGCAGGCTGAAGATATTG |
| | | | GCAGCCTGCGACCTGAGGACACGGC | | CAACATATTACTGTCAACAGTATGA |
| | | | TGTGTATTACTGTGCGAAAAAGGGT | | TAATCTTCCTCCGATCACCTTCGGC |
| | | | CAACCATATTGCGGTGGTGATTGTC | | CAAGGGACACGACTGGAGATTAAAC |
| | | | ATTTCTACTACCTTGACTACTGGGG | | |
| | | | CCAGGGAACCCTGGTCACCGTCTCC | | |
| | | | TCAG | | |
| | C1012 | 703 | CAGGTGCAGCTGGTGCAGTCTGGGG | 704 | GAAATAGTGATGACGCAGTCTCCAG |
| | | | CTGAGGTGAAGAAGCCTGGGTCCTC | | CCACCCTGTCTGTGTCTCCAGGGGA |
| | | | GGTGAAGGTCTCCTGCAAGGCCTCT | | AAGAGCCACCCTCTCCTGCAGGGCC |
| | | | GGAGGCACCGTCAACAACTATGCTA | | AGTCAGAGTGTTAGCAGCCACTTAG |
| | | | TCAACTGGGTGCGACAGGCCC | | CCTGGTACCAGCAGAAACCTGG |
| | | | CTGGACAAGGGCTTGAGTGGATGGG | | CCAGGCTCCCAGGCTCCTCATTTAT |
| | | | AGGGATCGTCCCTATCTTTGGTACA | | GGTGCATCCACCAGGGCCACTGGTA |
| | | | CCAAACTACGCACAGAAGTTCCAGG | | TCCCAGCCAGGTTCAGTGGCAGTGG |
| | | | GCAGAGTCACAATTACCGCGGACGA | | GTCTGGGACAGAGTTCACTCTCACC |
| | | | ATCTACGAGCACAGCCTACATGGAG | | ATCAGCAGCCTGCAGTCTGAAGATT |
| | | | CTGAGCAGCCTGAGATCTGAGGACA | | TTGCAGTTTATTACTGTCAGCAGTA |
| | | | CGGCCGTGTATTACTGTGCGAAAGT | | TCATAATTGGCCTCCCGCGCTCACT |
| | | | CTCCCTTACACTTCCTATAGCAGCA | | TTCGGCGGAGGGACCAAGGTGGAAA |
| | | | GCTCCAAGGTTCTGGTTCGACTCCT | | TCAAAC |
| | | | GGGGCCAGGGAACCCTGGTCACCGT | | |
| | | | CTCCTCAG | | |
| | C1013 | 705 | CAGGTGCAGCTGGTGCAGTCTGGGG | 706 | GAAATAGTGATGACGCAGTCTCCAG |
| | | | TTGAAGTGAAGAAGCCTGGGTCCTC | | CCACCCTGTCTGTGTCTCCAGGGGA |
| | | | GGTGAAGGTCTCCTGCAAGGCTTCT | | AAGAGCCACCCTCTCCTGCAGGGCC |
| | | | GGAGGCACCTTCACTGACTATGCTT | | AGTCAGGGTGTTAGTACCCACTTAG |
| | | | TCAGCTGGGTGCGACAGGCCCCTGG | | CCTGGTACCAACAAAAACCTGGCCA |
| | | | ACAAGGGCTTGAGTGGATGGGAGGG | | GGCTCCCAGGCTCCTCATCTATGGT |
| | | | ATCGTCCCTATATTTGCAACACCAG | | GCATCCACCAGGGCCACTGGTATCC |
| | | | ACTACGCAGAGAAGTTCCGGGGCAG | | CAGCCAGGTTCAGTGGCAGTGGGTC |
| | | | AGTCACGATTACCGCGGACGAATCC | | TGGGACAGAGTTCACTCTCACCATC |
| | | | ACGAGCACAGCCTACATGGAGCTGA | | AGCAGCCTGCAGTCTGAAGATTTTG |
| | | | GCACCCTGAAATCCGAGGACACGGC | | CAGTTTATTACTGTCAGCAGTATCA |
| | | | CGTGTATTACTGTGCGAGAGCCTCC | | TAAGTGGCCTCCCGCGCTCACTTTC |
| | | | CTTACACTTCCTATAAGAGCAGCTC | | GGCGGAGGGACCAAGGTGGAGATCA |
| | | | CTAGGTTCTGGTTCGACGCCTGGGG | | AAC |
| | | | CCAGGGAACCCTGGTCACCGTCTCC | | |
| | | | TCAG | | |
| | C1014 | 707 | CAGGTGCAGCTGCAGGAGTCGGGCC | 708 | GAAATAGTGATGACGCAGTCTCCAG |
| | | | CAGGACTGGTGAGGCCTTCACAGAC | | CCACCCTGTCTGTGTCTCCAGGGGA |
| | | | CCTGTCCCTCACCTGCACTGTTTCT | | AAGAGCCACCCTCTCCTGCAGGGCC |
| | | | GGTGGCTCCATCGGCAGTGGCGCTT | | AGTCAGAGTATTAGCAGCAACTTAG |
| | | | ACTGGAGCTGGATCCGCCAGCACCC | | CCTGGTACCAGCAGAAACCTGGCCA |
| | | | AGCGAAGGGCCTGGAGTGGATTGGG | | GCCTCCCAGGCTCCTCATCTATGGT |
| | | | TACGTCTATTATAGTGGGAGCACCT | | GCATCCACCAGGGCCACTGGTATCC |
| | | | TCTACAACCCGTCCCTCGAGACTCG | | CAGCCAGGTTCAGTGGCAGTGGGTC |
| | | | AGTTTCCATATCAGTAGACATCTCT | | TGGGACAGAGTTCACTCTCACCATC |
| | | | AAGGACCAGTTCTCCCTGGAACTGA | | AGCAGCCTGCAGTCTGAAGATATTG |
| | | | CTTCTGTGACTGTCGCGGACACGGC | | CAGTGTATTACTGTCAGCACTATAA |
| | | | CGTGTATTACTGTGCGAGAGAGAAG | | TAACTGGCCCCCGTGGACGTTCGGC |
| | | | ATTGAGGTTGTCTCGATTGAGATGC | | CAAGGGACCAAGGTGGATATCAAAC |
| | | | GACCCCACTACTACGGCATAGACGT | | |
| | | | CTGGGGCCAAGGGACCACGGTCACC | | |
| | | | GTCTCCTCA | | |
| | C1015 | 709 | CAGGTGCAGCTGCAGGAGTCGGGCC | 710 | GACATCCAGTTGACCCAGTCTCCAT |
| | | | CAAGACTGGTGAAGCCTTCGGGGAG | | CCTTCCTGTCTGCATCTGTAGGAGA |
| | | | CCTGTCCCTCACGTGCGCTGTCTCT | | CAGAGTCACCATCACTTGCCGGGCC |
| | | | GGTGGCTCCCTCAGTAGTAGTAACT | | AGTCAGGGCATTAGCAGTTATTTAG |
| | | | GGTGGAATTGGGTCCGCCAGTCCCC | | CCTGGTATCAGCAAAAACCAGGGAA |
| | | | CGAGAAGGGGCTGGAATGGATTGGA | | AGCCCCTAAGCTCCTGATCTATGCT |
| | | | GAAATCTTTCATAGTGGGAGCACCT | | GCATCCACTTTGCAAAGTGGGGTCC |
| | | | ACTACAACCCGTCCCTCAAGAGTCG | | CATCAAGGTTCAGCGGCAGTGGATC |
| | | | AGTCACCATATCAGTAGACAAGTCC | | TGGGACAGAATTCACTCTCACAATC |
| | | | AAGAATCACTTCTCCCTGAATCTGA | | AGCAGCCTGCAGCCTGAAGATTTTG |
| | | | GGTCTGTGACCGCCGCGGACACGGC | | CAACTTATTACTGTCAACAGCTTAA |
| | | | CGTCTATTACTG | | TAGTTACCCTCTCACTTTCGGCGGA |
| | | | TGCGGGTTCATACAGTAACTACATC | | GGGACCAAGGTGGAAATCAAAC |
| | | | GGGGGGGTCTGGTTCGACCCCTGGG | | |
| | | | GCCAGGGGACCCTGGTCACCGTCTC | | |
| | | | CTCAG | | |
| | C1016 | 711 | CAGGTGCAGCTGCAGGAGTCGGGCC | 712 | CAGTCTGCCCTGACTCAGCCTGCCT |
| | | | CAGGACTGGTGAAGCCTTCGGGGAC | | CCGTGTCTGGGTCTCCTGGACAGTC |
| | | | CCTGTCCCTCACCTGCGCTGTGTCT | | GATCACCATCTCTTGTACTGGAACC |
| | | | GGAGGCCCCATCAGTAGTAATCACT | | AGCAGTGACGTTGGTGCTAATAATT |
| | | | GGTGGAGTTGGGTCCGCCAGCCCCC | | ATGTCTCCTGGTACCAACAACACCC |
| | | | AGGGAAGGGGCTGGAGTGGATTGGG | | AGGCAAAGCCCCCAAACTCATGATT |
| | | | GAAGTCTATCGTAATGGGAACACCA | | TATGATGTCATTAATCGGCCCTCAG |
| | | | ACTACCACCCGTCCCTCAAGAGTCG | | GGGTCTCTGATCGCTTCTCTGGCTC |
| | | | AGTCACCATGTCCATAGACAACTCC | | CAAGTCTGGCAACACGGCCTCCCTC |
| | | | AAGAACCAGTTTTCCCTGAGCCTGA | | ACCATCTCTGGGCTCCAGGCTGAGG |
| | | | CCTCTGTGACCGCCGCGGACACGGC | | ACGAGGCTGATTATTACTGCAGTTC |
| | | | CGTATATTATTGTGCAAGAGGGGGG | | ATTTTCAACTAGCAGCACTCTTCTT |
| | | | GATCTCGCAATGGGCCCCGAATATC | | TTCGGCGGGGGGACCAAACTGACCG |
| | | | TTGACTTCTGGGGCCAGGGAACCCT | | TCCTAG |
| | | | GGTCACCGTCTCCTCAG | | |
| | C1018 | 713 | CAGGTGCAGCTGGTGGAGTCTGGGG | 714 | CAGTCTGTGCTGACGCAGCCGCCCT |
| | | | GAGGCGTGGTCCAGCCTGGGAGGTC | | CAGTGTCTGGGGCCCCAGGGCAGAG |
| | | | CCTGAGACTCCTCTGTGCAGCGTCT | | GGTCACCATCTCCTGCGCCGGGAGC |
| | | | GGCTTCACCTTCAACACCCATGGCA | | AGCTCCAACATCGGGGCAGGTTATG |
| | | | TGCACTGGGTCCGCCAGGCTCCAGG | | GTGTACACTGGAGCCAACAACTTCC |
| | | | CAAGGGGCTGGAGTGGGTGGCAGTG | | GGGAAGACCCCCCAAACTCCTCATC |
| | | | ATTTGGTTTGATGGAAGTAACAAAT | | TATGGTGACAGCAATCGCCCCTCTG |
| | | | ACTATGCAGACTCCGTGAAGGGCCG | | GGGTCCCTGACCGATTCTCTGGCTC |
| | | | ATTCACCATCTCGAGAGACAATTCC | | CAACTCTGGCACATCAGCCTCCCTG |
| | | | ACGAACACCCTCTATCTGCAAATGA | | GCCATCACTGGGCTTCAGGCTGAGG |
| | | | ACAGCCTGAGAGCCGAGGACACGGC | | ATGAGGCTGTTTATTACTGCCAGTC |
| | | | TGTGTATTATTGTGCGAGAGTTTAT | | GTATGACAGAAGCCTGAGAGCTTGG |
| | | | GGTGGTCTCCCCTACTATTACGCTA | | GTGTTCGGCGGAGGGACTAAACTGT |
| | | | TAGATGTCTGGGGCCAAGGGACCAC | | CCGTCCTAG |
| | | | GGTCACCGTCTCCTCA | | |
| | C1019 | 715 | CAGGTGCAGCTGGTGGAGTCTGGGG | 716 | AATTTTATGCTGACTCAGCCCCACT |
| | | | GAGGCGTGGTCCAGCCTGGGACGCC | | CTGTGTCGGAGTCTCCGGGGAAGAC |
| | | | CCTGAGACTCTCCTGTGCAGCCTCT | | GGTAACCATCTCCTGCACCGGCAGC |
| | | | GGATTCACCTTCAGTAGCTATGCTA | | AGTGGCAGCATTGCCAACAACTATG |
| | | | TGCACTGGGTCCGCCAGGCTCCAGG | | TGCAGTGGTACCAGCAGCGCCCGGG |
| | | | CAAGGGGCTGGAGTGGGTGGCAATG | | CAGTGCCCCCACTCCTGTGATCTAT |
| | | | ATATCATATGATGGAGGCAATAAAT | | GAGGATGACCAAAGACCCTCTGGGG |
| | | | ACTACGCGGACTCCGTGAAGGGCCG | | TCCCTGATCGCTTCTCTGGCTCCAT |
| | | | ATTCACCATCTCCAGAGACAATTCC | | CGACAGCTCCTCCAACTCTGCCTCC |
| | | | AAGAACACGCTGTTTCTGCAAATGA | | CTCAGCATCTCTGGACTGAAGACTG |
| | | | ACAGCCTGAGAGGTGAGGACACGGC | | AGGACGAGGCTGATTACTACTGTCA |
| | | | TGTGTATTACTGTGCGAGGTCATTT | | GTCTTATGATAGCACCAATTTTTGG |
| | | | TCCATCCGCATTGGACATAAGGACA | | GTGTTCGGCGGAGGGACCAAGCTGA |
| | | | ACTGGGGCCAGGGAACCCTGGTCAC | | CCGTCCTAG |
| | | | CGTCTCCTCAG | | |
| | C1020 | 717 | CAGGTGCAGCTGGTGCAGTCTGGGG | 718 | GACATCCAGATGACCCAGTCTCCAT |
| | | | CTGAGGTGAAGAAGCCTGGGGCCTC | | CCTCCCTGTCTGCATCTGTAGGAGA |
| | | | TGTGAAGATTTCCTGCAAGGCATCT | | CAGAGTCACCATCACTTGCCGGGCA |
| | | | GGATACAGCTTCAGCAACTACTATA | | AGTCAGAGCATTACCACCTCCTTAA |
| | | | TACACTGGGTGCGACAGGCCCCTGG | | ATTGGTATCAGCAGAAACCAGGGAA |
| | | | ACAAGGGCTTGAGTGGATGGGAATA | | AGCCCCTAAGCTCCTGATCTATTCT |
| | | | ATCAACCCTAGTGGTAATAGCATAA | | GCATCCACTTTGGAAAGTGGGGTCC |
| | | | GCTACGCACAGAAGTTCCAGGGCAG | | CATCAAGGTTCAGTGGCAGTGGATC |
| | | | AGTCACCATGACCGGGGACACGTCC | | TGGGACAGATTTCACTCTCACCATC |
| | | | ACGAGCACAGTCTACATGGA | | AGCAGTCTGCAACCTGAAGATTTTG |
| | | | GCTGAGCAGCCTAAGATCTGAGGAC | | CAACTTATTATTGTCAGCAGACTTA |
| | | | ACGGCCGTATATTACTGTGCGAGAT | | CAGAGCCCCTCCGTACACTTTTGGC |
| | | | CGGTTTTCCCGGTACCAGCTGCGGG | | CAGGGGACCAAGCTGGAGATCAAAC |
| | | | GGGTTGTGACTACTGGGGCCAGGGA | | |
| | | | ACCCTGGTCACCGTCTCCTCAG | | |
| | C1021 | 719 | CAGGTGCAGCTGGTGCAGTCTGGGG | 720 | GAAATTGTGTTGACACAGTCTCCAG |
| | | | CTGAGCTAAAGAAGCCTGGGGCCTC | | CCACCCTGTCTTTGTCTCCAGGGGA |
| | | | AGTGAAGGTTTCCTGCAAGGCTTCT | | AAGAGCCACCCTCTCCTGCAGGGCC |
| | | | GGATATACCTTCTCCACCTACTATA | | AGTCAGAGTATTAGTAGCTACTTAG |
| | | | TACACTGGGTGCGACAGGCCCCTGG | | CCTGGTACCAACAGAAACCTGGCCA |
| | | | ACAAGGGCTAGAGTGGATGGGAATA | | GGCTCCCAGGCTCCTCATTTATGAT |
| | | | ATCAACCCTGAAGCTGGTAGCACAA | | GCATCCAACAGGGCCACTGACATCT |
| | | | GCTATGCACAGAAGTTCCAGGGCAG | | CAGCCAGGTTCAGTGGCAGTGGGTC |
| | | | AGTCACCATGACCACGGACACGTCC | | TGGGACAGACTTCACTCTCACCATC |
| | | | ACGAGCACAGTCTACATGGAGTTGA | | AGCAGCCTAGAGCCTGAAGATTTTG |
| | | | TCAGCCTGAGATCTCAGGACACGGC | | CAGTTTATTACTGTCAGCACCGTAG |
| | | | CATATATTACTGTGCGAGAGATGCT | | CAACTGGCCTCCCTCGTTCACTTTC |
| | | | GTTGGAGTCCCAGCTATAAACTCGC | | GGCGGAGGGACCAAGGTGGAAATCA |
| | | | TTGAGTACTGGGGCCAGGGAACCCT | | AAC |
| | | | GGTCACCGTCTCCTCAG | | |
| | C1022 | 721 | CAGGTGCAGCTGGTGCAGTCTGGGG | 722 | CAGTCTGCCCTGACTCAGCCTGCCT |
| | | | CTGAGGTGAAGACGCCTGGGGCCTC | | CCGTGTCTGGGTCTCCTGGACAGTC |
| | | | AGTGAAGGTCTCCTGCCAGGCATCT | | GATCACCATCTCCTGCACTGGAACC |
| | | | GGAGACACCTTCACCAGCCAGTATC | | AGCAGTGACGTTGGTGGTTATAACT |
| | | | TGCACTGGGTGCGACAGGCCCCTGG | | ATGTCTCCTGGTACCAACAACACCC |
| | | | ACAAGGGCTTGAGTGGATGGGAATA | | AGGCAAGGCCCCCAAACTCATGATT |
| | | | ATCAACCCCACTGCTGGAAGCACAA | | TATGATGTCAGTAATCGGCCCTCAG |
| | | | CGTACGCACAGAAGTTTCAGGGCAG | | GGGTTTCTACTCGCTTCTCTGGCTC |
| | | | AGTCACCATGACCAGGGACACGTCC | | CAAGTCTGGCAACACGGCCTCCCTG |
| | | | ACGAGCACAGTCTACATGGAATTGA | | ACCATCTCTGGGCTCCAGGCTGAGG |
| | | | GGAGTCTGAGATCTGAGGACATGGC | | ACGAGGCTGATTATTACTGCAGCTC |
| | | | CGTGTATTACTGTGCGAGAGGCGGA | | ACCTACAAGCAGCAACACTCACGTC |
| | | | TTTATCCCTATGGTTCGGGGATTTA | | TTCGGAACTGGGACCAAGGTCACCG |
| | | | TCGACCACTGGGGTCAGGGAACCCT | | TCCTAG |
| | | | GGTCACCGTCTCCTCAG | | |
| | C1023 | 723 | CAGGTGCAGCTGGTGCAGTCTGGGG | 724 | GAAATTGTGTTGACGCAGTCTCCAG |
| | | | CTGAAATGAAGAAGCCTGGGGCCTC | | GCACCCTGTCTTTGTCTCCAGGGGA |
| | | | AGTGAAAATTTCCTGCAAGGCATCT | | AAGAGCCACCCTCTCCTGCAGGGCC |
| | | | GGGGACACCTTCACCACCAACTATT | | AGTCAGAGTGTTAGTCACAGGTACT |
| | | | TCCACTGGGTGCGACAGGCCCCTGG | | TGGCCTGGTACCAGCAGAAACCTGG |
| | | | ACAAGGGCTTGAGTGGATGGGAATA | | CCAGGCTCCCAGGCTCCTCATCGAT |
| | | | ATCAACCCTAGTGCTGGTAGCACAA | | GGTGCATCCAACAGGGCTACTGGCA |
| | | | CCTACGCACAGAGATTTCAGGGCAG | | TCCCAGACAGGTTCAGTGGCAGTGG |
| | | | AGTCACCATGACCGGGGACTCGTCC | | GTCTGGGACAGACTTCACTCTCACC |
| | | | ACGAACACAGTCTACTTGGAGCTTC | | ATCAGCAGACTGGAGCCTGAAGATT |
| | | | GCAGTCTGAGATCTGAGGACACGGC | | TTGGAGTGTATTACTGTCAGCAATA |
| | | | CATGTATTTCTGTGCGAAAGGGTCT | | TGGTAGCTCCCCTCCGTTCACTTTT |
| | | | TATATTCCTGCTATGAGGTCGTCGT | | GGCCAGGGGACCAAGCTGGAGATCA |
| | | | TCGACCCCTGGGGCCAGGGAACCCT | | AAC |
| | | | GGTCACCGTCTCCTCAG | | |
| | C1024 | 725 | CAGGTGCAGCTGGTGGAGTCTGGGG | 726 | AATTTTATGCTGACTCAGCCCCACT |
| | | | GAGGCGTGGTCCAGCCTGGGAGGTC | | CTGTGTCGGAGTCTCCGGGGAAGAC |
| | | | CCTGAGACTCTCCTGTGCAGCCTCT | | GGTAACCATCTCCTGCACCGGCTCC |
| | | | GGATTCACCTTCAGTGACTACGCTA | | AGTGGCAGCATTGCCAGCAACTATG |
| | | | TGCACTGGGTCCGCCAGGCTCCAGG | | TGCATTGGTACCAGCAGCGCCCGGG |
| | | | GAAGGGGCTGGAGTGGGTGGCAATG | | CAGTGCCCCCACCACTGTGATCTTT |
| | | | ATATCCTATGATG | | GAAGATAACCAAAG |
| | | | GAAACAGTCAATACTACGCAGACTC | | ACCCTCTGGGGTCCCTGATCGGTTC |
| | | | CGTGAAGGGCCGATTCACCATTTCC | | TCTGGCTCCATCGACAGCTCCTCCA |
| | | | AGAGACAATTCCAAGAACACACTGT | | ACTCTGCCTCCCTCACCATCTCTGG |
| | | | ATTTGCAAATGAACATCCTGAGACC | | ACTGAAGACTGAGGACGAGGCTGAC |
| | | | TGAGGACACGGCTGTCTATTACTGT | | TACTACTGTCAGTCTTATGATAGCA |
| | | | GCGAGAACATTTTCCATCCGGATTG | | GCAGTTTTTGGGTGTTCGGCGGAGG |
| | | | GACATCATGACTACTGGGGCCAGGG | | GACCAAGCTGACCGTCCTAG |
| | | | AACCCTGGTCACCGTCTCCTCAG | | |
| COV107 | C903 | 727 | GAGGTGCAGCTGGTGGAGTCTGGAG | 728 | GAAATTGTGTTGACGCAGTCTCCAG |
| | | | GAGGCTTGATCCAGCCTGGGGGGTC | | GCACCCTGTCTTTGTCTCCAGGGGA |
| | | | CCTGAGACTCTCCTGTGCAGCCTCT | | AAGAGCCACCCTCTCCTGCAGGGCC |
| | | | GGGTTCATCGTCAGTAGGAACTACA | | AGTCAGAGTGTTAGCAGCAGCTACT |
| | | | TGAGCTGGGTCCGCCAGGCTCCCGG | | TAGCCTGGTACCAGCAAAAACCTGG |
| | | | GAAGGGGCTGGAGTGGGTCTCAATT | | CCAGGCTCCCAGGCTCCTCATCTTT |
| | | | ATTTATAGTGGTGGTAGTACATTCT | | GATGTATCCAGCAGGGCCACTGGCA |
| | | | ACGCAGACTCCGTGAAGGGCCGATT | | TCCCAGACAGGTTCAGTGGCAGTGG |
| | | | CACCATCTCCAGAGACAATTCCAAG | | GTCTGGGACAGACTTCACTCTCACC |
| | | | AACACGGTGTATCTTCAAATGAACA | | ATCAGCAGACTGGAGCCTGAAGATT |
| | | | GCCTGAGAGCCGAGGACACGGCCGT | | TTGCAGTGTATTACTGTCAGCAGTA |
| | | | GTATTACTGTGCGAGAGATTACGGT | | TGGTAGCTCACCTCGTACGTTCGGC |
| | | | GACTTCTACTTTGACTACTGGGGCC | | CAAGGGACCAAGGTGGAAATCAAAC |
| | | | AGGGAACCCTGGTCACCGTCTCCTC | | |
| | | | AG | | |
| | C904 | 729 | CAGGTGCAGCTACAGCAGTGGGGCG | 730 | GAAATTGTGTTGACGCAGTCTCCAG |
| | | | CAGGACTGTTGAAGCCTTCGGAGAC | | GCACCTTGTCTTTGTCTCCAGGGGA |
| | | | CCTGTCCCTCACCTGCGCTGTCAAT | | AAGAGCCACCCTCTCCTGCAGGGCC |
| | | | GGTGGGTCCTTAAGTCTTTACTATT | | AGTCAGAGTGTTGCCGGCAGCTACT |
| | | | GGAGTTGGATCCGCCAGTCCCCAGG | | TAGCCTGGTATCAGCAGAAACCTGG |
| | | | GAAGGGGCTGGAGTGGATTGGAGAA | | CCAGGCTCCCAGGCTCCTCATCTAT |
| | | | ATCAATCATTTTGGAGGCTCCGACT | | GGTGCATCCAGCCGGGCCACTGGCG |
| | | | ACAAGCCGTCCCTCAAGAGTCGAGT | | TCCCAGACAGGATCAGTGGCAGTGG |
| | | | CAGCATATCAGTTGACACGTCCACG | | GTCTGGGACAGACTTCACTCTCACC |
| | | | AACCAGTTCTCCCTGAAATTGAGCT | | ATCAGCAGACTGGAGCCTGAGGATT |
| | | | CTGTGACCGCCGCGGACACGGCTGT | | TTGCAGTGTATTACTGTCAGCAGTA |
| | | | TTATTACTGTGCGAGAAAGCCCCTC | | TACTAACACACCTCGGACTTTCGGC |
| | | | CTCCACAGTAACATTTCACCTGGCG | | GGAGGGACCAAGGTGGAAATCA |
| | | | CTTTTGATATCTGGGGTCAAGGGAC | | |
| | | | AATGGTCACCGTCTCTTCAG | | |
| | C905 | 731 | CAGGTGCAGCTGCAGGAGTCGGGCC | 732 | AATTTTATGCTGACTCAGCCCCACT |
| | | | CAGGGCTGGTGACGCCTTCACAGAC | | CTGTGTCGGAGTCTCCGGGGAAGAC |
| | | | CCTGTCCCTCACCTGCAGTGTCTCT | | GGTGACCATCTCCTGCACCGGCAGC |
| | | | GGTGGCTCCATCCACAGTAGGGATT | | GGTGGCAGCATTGCCAGCAACTATG |
| | | | TCTACTGGGGCTGGATCCGCCAGCA | | TGCAGTGGTACCAGCAGCGCCCGGG |
| | | | CCCAGGGAAGGGCCTGGAGTGGATT | | CAGTGCCCCCACCACTGTGATCTAT |
| | | | GGGCACATCTATTACACTGGGAACA | | GAAGATAATGAAAGACCCTCTGGGG |
| | | | CCTACTACAATCCGTCCCTCAAGAG | | TCCCTGATCGGTTCTCTGGCTCCAT |
| | | | TCGAGTCACCATATCAGCAGACACG | | CGACAGCTCCTCCAACTCTGCCTCC |
| | | | TCTAAGAACCAGTTCTCCCTGAAAC | | CTCACCATCTCTGGAGTGAAGACTG |
| | | | TGAGTTCTGTGACTGCCGCGGACAC | | AGGACGAGGCTGACTACTTCTGTCA |
| | | | GGCCGTGTATTACTGTGCAAGAGCG | | GTCTTATGATGTCGGCAATCCTGTG |
| | | | ACAGTAGTGATTACCCTCCACTGGT | | ATATTCGGCGGAGGGACCAAGCTGA |
| | | | TCGACCCCTGGGGCCAGGGAACCCT | | CCGTCCTA |
| | | | GGTCACCGTCTCCTCAG | | |
| | C906 | 733 | GAGGTGCAGCTGGTGGAGTCTGGGG | 734 | GATATTGTGATGACTCAGTCTCCAC |
| | | | GAGGCTTGATAAAGCCAGGGCGGTC | | TCTCCCTGTCCGTCACCCCTGGAGA |
| | | | CCTGAGACTCTCTTGTACAGCCTCT | | GCCGGCCTCCATCTCCTGCAGGTCT |
| | | | GGATTCACCTTTGGTGATTATGCTA | | AGTCAGAGCCTCCTGCATAGTAATG |
| | | | TGACCTGGTTCCGCCAGGCTCCA | | GAATCAACTATTTCGATTGGTACCT |
| | | | GGGAAGGGGCTGGAGTGGGTAGGTT | | GCAGAAGCCAGGGCAGTCTCCACAG |
| | | | TCATTAGAAGCAAAGCTTATGGTGG | | CTCCTGATCTATTTGGGTTCTAATC |
| | | | GACAACAGGATACGCCGCGTCTGTG | | GGGCCTCCGGGGTCCCTGACAGGTT |
| | | | AAATACAGATTTACCATCTCAAGAG | | CAGTGGCAGTGGATCAGGCACAGAT |
| | | | ATGATTCCAAAAGCATCGTCTATCT | | TTTACACTGAAGATCAGCAGAGTGG |
| | | | GCAAATGGACAGCCTGAAAACCGAG | | AGGCTGAGGATGTTGGGGTTTATTA |
| | | | GACACAGCCGTCTATTACTGTACTA | | CTGCATGCAAGTTCTACAAATTCCG |
| | | | GGTGGGACGGGTGGAGTCAACATGA | | TACACTTTTGGCCAGGGGACCAAGC |
| | | | CTATTGGGGCCAGGGAACCCTGGTC | | TGGAGATCAA |
| | | | ACCGTCTCCTCAG | | |
| | C907 | 735 | CAGGTGCAGCTGCAGGAGTCGGGCC | 736 | GACATCCAGATGACCCAGTCTCCAT |
| | | | CAGGACTGGTGAAGCCTTCGGAGAC | | CCTCCCTGTCTGCATTTGTAGGAGA |
| | | | CCTGTCCCTCACCTGCACTGTCTCT | | CAGAGTCACCATCACTTGCCGGGCA |
| | | | GGTGGCTCCATCACTAGTTACTACT | | GGTCAGAGTATTAGCAGCTATTTAC |
| | | | GGACCTGGATCCGGCAGTCCCCAGG | | ATTGGTATCAGCAGAAACCAGGGAA |
| | | | GAAGGGACTGGAGTGGATTGGGTAT | | AGCCCCTAAGCTCCTGATCTATGCT |
| | | | ATCTATTACATTGGGAGCACCAACT | | ACATCCACTTTGCAAAGTGGAGTCC |
| | | | ACAACCCCTCCCTCAAGAGTCGACT | | CATCAAGGTTCAGTGGCAGAGGATC |
| | | | CACCATATCACTAGCCACGTCGAAG | | TGGGACAGATTTCACTCTCACCATC |
| | | | AACCAGTTCTCCCTGAGGCTGAACT | | AGCGGTCTCCAACCTGAAGATTTTG |
| | | | CTGTGACCGCTGCGGACACGGCCGT | | CAACTTACTACTGTCAACAGAGTTA |
| | | | GTATTACTGTGCGAGTTATTACAAT | | CAGTACCCCTCAGACGTTCGGCCAA |
| | | | GATACTAGTGGTTATTCATACGGTC | | GGGACCAAGGTGGAAATCAAAC |
| | | | TGGACGTCTGGGGCCAAGGGACCAC | | |
| | | | GGTCACCGTCTCCTCA | | |
| | C908 | 737 | GAGGTGCAGCTGGTGCAGTCTGGAG | 738 | CAGTCTGTGCTGACTCAGCCACCCT |
| | | | CAGAGGTGAAAAAGCCCGGGGAGTC | | CAGCGTCTGGGACCCCCGGGCAGAG |
| | | | TCTGAAGATCTCCTGTAAGGCTTCC | | GGTCACCATCTCGTGTTCTGGGAGC |
| | | | GGATACAGCTTTACCATCTACTGGA | | AGCTCCAACATCGGAGATAATACCG |
| | | | TCGGCTGGGTGCGCCAGATGCCCGG | | TAAACTGGTACCAGCAGCTCCCAGG |
| | | | GAAAGGCCTGGAGTGGATGGGGATC | | AACGGCCCCCAAACTCCTCATCTAT |
| | | | ATCTATCCTGGTGAGTCTGAAACCA | | AATAATATTCAGCGGCCCTCAGGGG |
| | | | GATACAGCCCGTCCTTCCAAGGCCA | | TCCCTGACCGATTCTCTGGCTCCAA |
| | | | GGTCACCATCTCAGCCGACAAGTCC | | GTCTGGCACCTCAGCCTCCCTGGCC |
| | | | ATCAGCACCGCCTACCTGCAGTGGA | | ATCAGTGGGCTCCAGTCTGAGGATG |
| | | | GGAGCCTGAAGGCCTCGGACACCGC | | AGGCTGATTATTACTGTGCATCATG |
| | | | CATGTATTACTGTGCGAGGGGAGGG | | GGATGACAGCCTGAATGGTCCTGTG |
| | | | CCCCCCGGGGGGGTCAAACTGGAAC | | GTATTCGGCGGAGGGACCAAGCTGA |
| | | | TGACTGACTACTGGGGCCAGGGAAC | | CCGTCCTAG |
| | | | CCTGGTCACCGTCTCCTCAG | | |
| | C909 | 739 | CAGGTGCAGCTGGTGCAGTCTGGGG | 740 | CAGTCTGCCCTGACTCAGCCTGCCT |
| | | | CTGAGGTGAAGAAGCCTGGGGCCTC | | CCGTGTCTGGGTCTCCTGGACAGTC |
| | | | AGTGAAGGTCTCCTGCAGGGCTTCT | | GATCACCATCTCCTGCACTGGAACC |
| | | | GGATACACCTTCCCCAACTATGATC | | AGCAGTGATGTTGGGGGTTATAACC |
| | | | TTAACTGGGTGCGACAGGCCACTGG | | TTGTCTCTTGGTACCAACAGTACCC |
| | | | ACAAGGGCTTGAGTGGATGGGATGG | | AGGCAACGTCCCCAAACTCATGATC |
| | | | ATGAACCCTAACAGTGGTAACACAG | | TATGAGGACGCTAAGCGGCCCTCAG |
| | | | GCTATGCACAGAAGTTCCAGGGCAG | | GGGTTTCTAATCGCTTCTCTGGCTC |
| | | | AATCACCATGACCAGGATCACGTCC | | GAAGTCTGCCAACACGGCCTCCCTG |
| | | | ATAAGCACAGCCTACATGGAGCTGA | | ACAATCTCTGGGCTCCAGGCTGAGG |
| | | | GCAGCCTGAGATCTGAGGACACGGC | | ACGAGGCTGATTATTACTGCTGCTC |
| | | | CGTATATTACTGTGCGAGAGGCCGG | | ATATGCAGGTAGTAGCACCCGTTAT |
| | | | GCTAATTGGAACTCGAACTTCCTCC | | GTCTTCGGAACTGGGACCAAGGTCA |
| | | | TTGACTCCTGGGGCCAGGGAACCCT | | CCGTCCTAG |
| | | | GGTCACCGTCTCCTCAG | | |
| | C910 | 741 | CAGGTGCAGCTGGTGCAGTCTGGGG | 742 | CAGTCTGCCCTGACTCAGCCTGCCT |
| | | | CTGCGGTGAAGAAGCCTGGGGCCTC | | CCGTGTCTGGGTCTCCTGGACAGTC |
| | | | AGTGAAGGTCTCCTGCAAGGCTTCT | | GATCACCATCTCCTGCACTGGAACC |
| | | | GGATACACCTTCACCAGTTATGATA | | AGCAGTGATGTTGGGAGTTATAACC |
| | | | TCAACTGGGTGCGACAGGCCCCTGG | | TTGTCTCCTGGTACCAACAACACCC |
| | | | ACAAGGCCTTGAGTGGATGGGATGG | | AGGCACAGCCCCCAAACTCATGATT |
| | | | ATGAACCCTAACAGTGGTAACACAG | | TATGAGGGCAGTAAGCGGCCCTCAG |
| | | | GCTTTGCACAGAGGTTCCAGGGCAG | | GGGTTTCTGATCGCTTCTCTGGCTA |
| | | | AGCCACCCTGTCCAGGGACACCTCC | | CAAGTCTGGCAACACGGCCTCCCTG |
| | | | ATAACCACAGCCTACATGGAGCTGA | | ACAATCTCTGGGCTCCAGGCTGATG |
| | | | CCACCCTCAGATCTGAGGACACGGC | | ACGAGGCTGATTATTACTGCTGCTC |
| | | | CGTGTATTACTGTGCGAGAGGCCGG | | ATTTGCAGGGAGTACCACCCGTTAT |
| | | | GCTAACTACAACTCTAAGTTCCTCC | | GTCTTCGGCACTGGGACCAGGGTCA |
| | | | TTGACAACTGGGGCCAGGGAACCCT | | CCGTCCTAG |
| | | | GGTCACCGTCTCCTCAG | | |
| | C911 | 743 | CAGGTGCAGCTGGTGGAGTCTGGGG | 744 | GACATCCAGATGACCCAGTCTCCAT |
| | | | GAGGCGTGGTCCAGCCTGGGGGGTC | | CCTCCCTGTCTGCATCTGTAGGAGA |
| | | | CCTGAGACTCTCCTGTGCAGCCTCT | | CAGAGTCACCATCACTTGCCGGGCA |
| | | | GCATTCACCTTCAGTAGTTATGCTA | | AGTCAGAGCATTAACAGCTATTTAA |
| | | | TGCACTGGATCCGCCAGTCTCCAGG | | ATTGGTATCAGCAGAAACCAGGGAA |
| | | | CAAGGGGCTGGAGTGGGTGGCAGTT | | AGCCCCTAAACTCCTGATCTATGCT |
| | | | ATATCATCTGATGGAAGCAGTAAAT | | GCATCCAGTTTGCACAGTGGGGTCC |
| | | | TCTACGCAGACTCCGTGAAGGGCCG | | CATCAAGGTTCAGTGGCAGTGGATC |
| | | | ATTCACCATCTCCAGAGACAACTCC | | TGGGACAGATTTCACTCTCACCATC |
| | | | AAGAACACACTGTATCTGCAAATGA | | AGCAGTCTGCAACCTGAAGATTTTG |
| | | | ACAGCCTGAGCGCTGAGGACACGGC | | CAACTTACTACTGTCAACAGAGTTA |
| | | | TGTGTATTACTGTGCGAGAGATCTG | | CACTACCCTCGCGCTCACTTTCGGC |
| | | | GAGAATGTGCTGATAGAAGTGGCCC | | GGAGGGACCAAGGTGGAAATCAAAC |
| | | | TTCAGGACTGGGGCCAGGGAACCCT | | |
| | | | GGTCACCGTCTCCTCAG | | |
| | C912 | 745 | CAGGTGCAGCTGGTGGAGTCTGGGG | 746 | GACATCCAGATGACCCAGTCTCCAT |
| | | | GAGGCGTGGTCCAGCCTGGGAGGTC | | CCTCCCTGTCTGCATCTGTAGGAGA |
| | | | CCTGAGACTCTCCTGTGCAGCCTCT | | CAGAGTCACCATCACTTGCCGGGCA |
| | | | GGATTCAGCTTCAGTACCTACACCA | | AGTCAGAGCATTAGCAGTTATTTAA |
| | | | TGCACTGGGTCCGCCAGACTCCAGA | | ATTGGTATCAGCAGAAACCAGGGAA |
| | | | CAAGGGGCTGGAGTGGGTGGCAGTT | | AGCCCCTAAGCTCCTGATCTATGCT |
| | | | ATTTCAGATGATGGAAAGAATAAGT | | GCATCCAGCTTGCAAAGTGGGGTCC |
| | | | ACTACGCAGACTCCATGAAGGGCCG | | CATCAAGGTTCAGTGGCAGTGGATC |
| | | | ATTCACCATCTCCAGAGACAATTCC | | TGGGACAGATTTCACTCTCACCATC |
| | | | AAGAACACGCTGTATCTGCAAATGA | | AGCAGTCTGCAACCTGAAGATTTTG |
| | | | GCAGCCTCAGACCTGAGGACACGGC | | CAACTTATTATTGTCAACAGAGTTA |
| | | | TGTCTATTACTGTGCGAGGGATCTG | | CACTACCCTCGCGCTTACTTTCGGC |
| | | | GAGAATGTGATGATAGAAGTGGCCC | | GGAGGGACCAAGGTGGAGATCAAAC |
| | | | TTGAGTCCTGGGGCCAGGGAACCCT | | |
| | | | GGTCACCGTCTCCTCAG | | |
| | C913 | 747 | GAGGTGCAGCTGGTGGAGTCTGGGG | 748 | GACATCGTGATGACCCAGTCTCCAG |
| | | | GAGTCGTGGTACAGCCGGGGGGGTC | | ACTCCCTGGCTGTGTCTCTGGGCGA |
| | | | CCTGAGACTCTCTTGTGCAGCCTCT | | GAGGGCCACCATCAACTGCAAGTCC |
| | | | GGATTCACCTTTGACGATTATTCCA | | AGCCAGAGTGTTTTTTACATCTCCA |
| | | | TGCACTGGGTCCGTCAAGTTCCGGG | | ACAATAAGAACTACTTAGCTTGGTA |
| | | | AAAGGGTCTGGAGTGGATCGCTGTT | | CCAGCAGAAACCAGGACAGCCTCCT |
| | | | ATTTTTTGGGATGGTACCAGTACAT | | AAACTGCTCATTTACTGGGCATCTA |
| | | | ACTATGCAGACTCAGTGAAGGGCCG | | CCCGGGAGTCCGGGGTCCCTGACCG |
| | | | ATTCACCATCTCCAGAGACAACAGC | | ATTCAGTGGCGGCGGGTCTGGGACA |
| | | | AAAAAGTCCCTGTATTTGCAAATGA | | GATTTCACTCTCACCATCAGCAGCC |
| | | | ACAGCCTGAGAAGTGAGGACACCGC | | TGCAGGCTGAAGATGTGGCAGTTTA |
| | | | CTTGTATTACTGT | | TTACTGTCAGCAA |
| | | | GCAAAAGATTCGGAGGATTGTAGTA | | TATTATAATACTCCTTACACTTTTG |
| | | | GTACCAGCTGCTATGTTGACCACTG | | GCCAGGGGACCAAGCTGGAGATCAA |
| | | | GGGCCAGGGAACCCTGGTCACCGTC | | AC |
| | | | TCCTCAG | | |
| | C914 | 749 | CAGGTGCAGCTGCAGGAGTCGGGCC | 750 | CAGTCTGCCCTGACTCAGCCTCCCT |
| | | | CAGGACTGGTGAAGCCTTCACAGAC | | CCGCGTCCGGGTCTCCTGGACAGTC |
| | | | CCTGTCCCTCACCTGCACTGTCTCC | | AGTCACCATCTCCTGCACTGGAACC |
| | | | GGTGGCTCCATCACCAGTGGAGATT | | AGCACTGACGTTGGTGGTTATAACT |
| | | | ACTACTGGACTTGGATCCGCCAGCC | | TTGTCTCCTGGTACCAACAGCACCC |
| | | | CCCAGGGAAGGGCCTGGAGTGGATT | | AGGCAAAGCCCCCAAACTCATGATT |
| | | | GGGTACATCTATTACAGTGGGAACA | | TATGAGGTCAGTAAGCGGCCCTCAG |
| | | | CCTACTACAACCTGTCCCTCAGGAG | | GGGTCCCTGATCGCTTCTCTGGCTC |
| | | | TCGAATTACAATATCAGAAGACACG | | CAAGTCTGGCAACACGGCCTCCCTG |
| | | | TCCAAGAACCAGTTTTCCCTGAAGC | | ACCGTCTCTGGGCTCCAGGCTGAGG |
| | | | TGAGATCTGTGACTGCCGCAGACAC | | ATGAGGCTGATTATTACTGCAGCTC |
| | | | GGCCGTGTACTACTGTGCCAGAGCC | | ATATGCAGGCAGCAACATCCTTTAT |
| | | | ATGATTACGTTTGGGGGAGTTATCG | | GTCTTCGGAACTGGGACCAAGGTCA |
| | | | TCGTCTTAGACTACTGGGGCCAGGG | | CCGTCCTAG |
| | | | AACCCTGGTCACCGTCTCCTCAG | | |
| | C915 | 751 | CAGGTGCAGCTGCAGGAGTCGGGCC | 752 | CAGTCTGCCCTGACTCAGCCTCCCT |
| | | | CAGGACTGGTGAAGCCTTCACAGAC | | CCGCGTCCGGGTCTCCTGGACAGTC |
| | | | CCTGTCCCTCACCTGCACTGTCTCT | | AGTCACCATCTCCTGCACTGGAACC |
| | | | GGTGGCTCCATCAGCAGTGGTGATT | | AGCAGTGACGTTGGTGGTTATAACT |
| | | | ACTACTGGAGTTGGATCCGCCAGCC | | ATGTCTCCTGGTACCAACAGCACCC |
| | | | CCCAGGGAAGGGCCTGGAGTGGATT | | AGGCAAAGCCCCCAAACTCATGATT |
| | | | GGGTACATCTATTACAGTGACAGCA | | TATGAGGTCACTAAGCGGCCCTCAG |
| | | | CCTACTACAACCCGTCCCTCAGGAC | | GGGTCCCTGCTCGCTTCTCTGGCTC |
| | | | TCGAGTTACCATATCAGTAGACACG | | CAAGTCTGGCAACACGGCCTCCCTG |
| | | | TCCAAGAACCAGTTCTCCCTGAAGC | | ACCGTCTCTGGGCTCCAGGCTGAGG |
| | | | TGACCTCTGTGACTGCCGCAGACAC | | ATGAGGCTGATTATTACTGCAGCTC |
| | | | GGCCGTGTATTACTGTGCCAGAGCT | | ATATGCAGGCAGCATCCTCCTTTAT |
| | | | ATGATTACGTTTGGGGGAGTTATCG | | GTCTTCGGAACTGGGACCAAGGTCA |
| | | | TCCTCTATGACTACTGGGGCCAGGG | | CCGTCCTAG |
| | | | AACCCTGGTCACCGTCTCCTCAG | | |
| | C916 | 753 | GAGGTGCAGCTGGTGGAGTCTGGGG | 754 | GACATCCAGATGACCCAGTCTCCAT |
| | | | GAGGCTTGGTACAGCCTGGGGGGTC | | CCTCCCTGTCTGCATCTGTAGGAGA |
| | | | CCTGAGACTCTCCTGTGCAGCCTCT | | CAGAGTCACCATCACTTGCCGGGCA |
| | | | GGATTCACCTTCAGTAACTACGACA | | AGTCAGAGCATTAGCAGGTATTTAA |
| | | | TGCACTGGGTCCGCCAAGCTACAGG | | ATTGGTATCAGCAGAAACCAGGGAA |
| | | | AAGAGGTCTGGAGTGGGTCTCAACT | | GGCCCCTAAACTCCTGATCTATGCT |
| | | | ATTGGTACTGCTGGTGACACATACT | | GCATCCAGTTTGCAAAGTGGGGTCC |
| | | | ATCCTGGCTCCGTGAAGGGCCGATT | | CATCAAGGTTCAGTGGCAGTGGATC |
| | | | CACCATCTCCAGAGAAAATGCCAAG | | TGGGACAGATTTCACTCTCACCATC |
| | | | AACTCCTTGTATCTTCAAATGAACA | | AGCGGTCTGCAACCTGAAGATTTTG |
| | | | GCCTGAGAGCCGGGGACACGGCTCT | | CAACTTACTACTGTCAACAGAGTTA |
| | | | GTATTACTGTGCAAGAGTCCGCTAT | | CAGTACCCCTCAGTACACTTTTGGC |
| | | | GATAGTAGTGGTTATTTTTGGAGCC | | CAGGGGACCAAGCTGGAGATCAAAC |
| | | | TTGACTACTGGGGCCAGGGAACCCT | | |
| | | | GGTCACCGTCTCCTCAG | | |
| | C917 | 755 | GAGGTGCAGCTGGTGGAGTCTGGGG | 756 | GACATCCAGATGACCCAGTCTCCGT |
| | | | GAGGCTTGGTACAGCCTGGGGGGTC | | CCTCCCTGTCTGCATCTGTCGGAGA |
| | | | CCTGAGACTCTCCTGTGCAGCCTCT | | CAGAGTCACCATCACTTGCCGGGCA |
| | | | GGATTCACCTTCAGTAACTACGACA | | AGTCAGAGCATTAGCAGCTATTTAA |
| | | | TGCACTGGGTCCGCCAAGCTACAGG | | ATTGGTATCAGCAGAAACCAGGGAA |
| | | | AAAAGGTCTGGATTGGGTCTCAACT | | AGCCCCTAAGCTCCTGATCTATGCT |
| | | | ATTGGTACTGCTG | | GCATCCAGTTTGCAGA |
| | | | GTGACACATACTATCCAGGCTCCGT | | GTGGGGTCCCATCAAGGTTCAGTGG |
| | | | GAAGGGCCGATTCACCATCTCCAGA | | CAGTGGATCTGGGACAGATTTCACT |
| | | | GAAAATGCCAAGAACTCCTTGTATC | | CTCACCATCAGCAGTCTGCAACCTG |
| | | | TTCAAATGAACAGCCTGAGAGCCGG | | AAGATTTTGCAACTTACTACTGTCA |
| | | | GGACACGGCTGTGTATTACTGTGCA | | ACAGAGTTACAGTAACCCTCAGTAC |
| | | | AGAGTCCGCTTTGATACTAGTGGTT | | ACTTTTGGCCAGGGGACCAAGCTGG |
| | | | ATTTTTGGAGCCTTGACTACTGGGG | | AGATCAAAC |
| | | | CCAGGGAACCCTGGTCACCGTCTCC | | |
| | | | TCAG | | |
| | C918 | 757 | CAGGTGCAGCTGGTGGAGTCTGGGG | 758 | GACATCCAGATGACCCAGTCTCCTT |
| | | | GGGGCTTGGTCAAGCCTGGAGGGTC | | CCACCCTGTCTGCATCTGTAGGAGA |
| | | | CCTGAGACTCTCCTGTACAGCCTCT | | CAGAGTCACCATCACTTGCCGGGCC |
| | | | GGATTCACCTTCAGTGACTACTACA | | AGTCAGAGTATTAGTAGCTGGTTGG |
| | | | TGACCTGGCTCCGCCAGGCTCCAGG | | CCTGGTATCAGCAGAAACCCGGGAA |
| | | | GAAGGGGCTGGAGTGGGTTTCATAC | | AGCCCCTAAGCTCCTGATCTATCAG |
| | | | ATTAGTAGTACTAGTCCTTACACAA | | GCGTCTAGTTTAGAAAGTGGGGTCC |
| | | | GCTACGCAGACTCTGTGAAGGGCCG | | CATCAAGGTTCAGCGGCAGTGGATC |
| | | | ATTCACCATCTCCAGAGACAACGCC | | TGGGACAGATTTCACTCTCACCATC |
| | | | AGGAACTCAGTGTATCTGCAAATGA | | AGCAGCCTGCAGCCTGATGATTTTG |
| | | | ACAGCCTGAGAGCCGAAGATACGGC | | CAACTTATTACTGCCAACAATATTT |
| | | | CATATATTACTGTGCGAGAGTCCCT | | TCGTTATTCGTGGACGTTCGGCCAA |
| | | | CCTCCACAGCGGCTGCACCCTTTTG | | GGGACCAAGGTGGAAATCAA |
| | | | ATGTCTGGGGCCAAGGGACAATGGT | | |
| | | | CACCGTCTCTTCAG | | |
| | C919 | 759 | CAGGTGCAGCTGGTGGAGTCTGGGG | 760 | GACATCCAGATGACCCAGTCTCCTT |
| | | | GAGGCTTGGTCAAGCCTGGGGGGTC | | CCACCCTGTCTGCATCTGTAGGAGA |
| | | | CCTGAGACTCTCCTGTACAGCCTCT | | CAGAGTCACCATCACTTGCCGGGCC |
| | | | GGATTCACCTTCAGTGACTACTACA | | AGTCAGAGTATTAGTAGCTGGTTGG |
| | | | TGACCTGGCTCCGCCAGGCTCCAGG | | CCTGGTATCAGCAGAAACCCGGGAA |
| | | | GAAGGGGCTGGAGTGGGTTTCATAC | | AGCCCCTAAGCTCCTGATCTTTAAG |
| | | | ATTAGTAGTACTAGTCCTTACACAA | | GCGTCTAGTTTAGAAAGTGGGGTCC |
| | | | GCTACGCAGACTCTGTGAAGGGCCG | | CATCAAGGTTCAGCGGCAGTGGATC |
| | | | ATTCACCATCTCCAGAGACAACGCC | | TGGGACAGATTTCACTCTCACCATC |
| | | | AGGAACTCAGTGTATCTGCAAATGA | | AGCAGCCTGCAGCCTGATGATTTTG |
| | | | ACAGCCTGAGAGCCGAAGATACGGC | | CAACTTATTACTGCCAACAGTATTT |
| | | | CGTATATTACTGTGCGAGAGTCCCT | | TCGTTATTCGTGGACGTTCGGCCAA |
| | | | CCTCCACAGCGGCTGCACCCTTTTG | | GGGACCAAGGTGGAAATCAA |
| | | | ATGTCTGGGGCCAAGGGACAATGGT | | |
| | | | CACCGTCTCTTCAG | | |
| | C920 | 761 | CAGCTGCAGCTGCAGGAGTCGGGCC | 762 | GAAATTGTGTTGACACAGTCTCCAG |
| | | | CAGGACTGGTGAAGCCTTCGGAGAC | | CCACCCTGTCTTTGTCTCCAGGGGA |
| | | | CCTGTCCCTCACCTGCGCTGTCTCT | | AAGAGCCACCCTCTCCTGCAGGGCC |
| | | | GGTGGCTCCATCAGCAATAGTCCTT | | AGTCAGAGTGTTAGCAGCTACTTAG |
| | | | TCTACTGGGGCTGGATCCGCCAGCC | | CCTGGTACCAACAAAAACCTGGCCA |
| | | | CCCCGGGAAGGGGCTGGAGTGCATT | | GGCTCCCAGCCTCCTCATCTATGAT |
| | | | GGGAGCATCTATTATAGTGGGAGCA | | GTATCCAACAGGGCCACTGGCATCC |
| | | | CCTACTACAACCCGTCCCTCAAGAG | | CAGCCAGGTTCAGTGGCAGTGGGTC |
| | | | TCGAGTCACCATATCCGTAGACACG | | TGGGACAGACTTCACTCTCACCATC |
| | | | TCCAAGAAGCAGTTCTCCCTGAAGC | | AGCAGCCTAGAGCCTGAAGATTTTG |
| | | | TGAGCTCTGTGACCGCCGCAGACAC | | CAGTTTATTACTGTCAGCAGCGTAT |
| | | | GGCTGTGTATTACTGTGCGAGACAT | | CAACTGGCCCTTGTACACTTTTGGC |
| | | | TTTGCCGATGGGTCGGGGAGAGTGG | | CAGGGGACCAAGCTGGAGATCAAAC |
| | | | TTGACTCCTGGGGCCAGGGAATCCT | | |
| | | | GGTCACCGTCTCCTCAG | | |
| | C921 | 763 | CAGCTGCAGCTGCAGGAGTCGGGCC | 764 | GAAATTGTGTTGACACAGTCTCCAG |
| | | | CAGGACTGGTGAAGCCTTCGGAGAC | | CCACCCTGTCTTTGTCTCCAGGGGA |
| | | | CCTGTCCCTCACCTGCGCTGTCTCT | | GAGAGCCACCCTCTCCTGCAGGGCC |
| | | | GGTGGCTCCATCAGCAATAGTCCTT | | AGTCAGAGTGTTACCACCTACTTAG |
| | | | TCTACTGGGCCTGGATCCGCCA | | CCTGGTACCAACAGAAACCTGGC |
| | | | GCCCCCAGGGAAGGGGCTGGAGTGC | | CAGGCTCCCAGGCTCCTCATCTATG |
| | | | ATTGGGAGCATCTATTATACTGGGA | | ATGTTTCCAGCAGGGCCACTGGCAT |
| | | | GCACCTACTACAACCCGTCCCTCAA | | CCCAGCCAGGTTCAGTGGCAGTGGG |
| | | | GAGTCGAGTCACCATATCCGTAGAC | | TCTGGGACAGACTTCACTCTCACCA |
| | | | ACGTCCACGAAGCAGTTCTCCCTGA | | TCAGCAGCCTCGAGCCTGAAGACTT |
| | | | AGCTGAGGTCTGTGACCGCCGCAGA | | TGCAGTTTATTACTGTCAGCAGCGT |
| | | | CACGGCTGTGTATTACTGTGCGAGA | | AGCAACTGGCCCTTGTACACTTTTG |
| | | | CATTTTGCCGATGGTTCGGGGAGAG | | GCCAGGGGACCAAGCTGGAGATCAA |
| | | | TGGTTGACTACTGGGGCCAGGGAAC | | AC |
| | | | CCTGGTCACCGTCTCCTCAG | | |
| | C922 | 765 | CAGGTGCAGCTGGTGGAGTCTGGGG | 766 | GACATCCAGATGACCCAGTCTCCAT |
| | | | GAGGCTTGGTCAAGCCTGGAGGGTC | | CCTCCCTGTCTGCATCTGTGGGAGA |
| | | | CCTGAGACTCTCCTGTGCAGGCTCT | | CAGAGTCACCATCACTTGCCAGGCG |
| | | | GGATTCACCTTCACTGACTACTACA | | AGTCAGGACATTAGCAACTTATTAA |
| | | | TGGCCTGGATCCGCCAGGCTCCAGG | | ATTGGTATCAACAGAAAGCAGGGAA |
| | | | GAAGGGGTTGGAGTGGGTTTCATAC | | AGCCCCTAAGCTCCTGATCTACGAT |
| | | | ATTAGTACTAGTGATAGATTCATAA | | GCATCCAATTTGGAAACAGGGGTCC |
| | | | ATTACGCAGACTCTGTGAAGGGCCG | | CATCAAGGTTCAGTGGAAGTGGATC |
| | | | ATTCACCATCTCCAGAGACGACGCC | | TGGGACAGACTTTACTTTCACCATC |
| | | | AAGAATTCACTGTATCTGCAAATGA | | AGCAGCCTGCAGCCTGAAGATATTG |
| | | | ATAGCCTGAGAGCCGAGGACACGGC | | CAACATATTACTGTCTACAGTATGA |
| | | | CGTGTATTATTGTGCGAGAGATGGC | | TAATCTCCCTCTGACTTTTGGCCAG |
| | | | GGTGGCTACGATCGGTTTGACCACT | | GGGACCAAGCTGGAGATCAAAC |
| | | | GGGGCCAGGGAACCCTGGTCACCGT | | |
| | | | CTCCTCAG | | |
| | C923 | 767 | CAGGTGCAGCTGGTGGAGTCTGGGG | 768 | GACATCCAGATGACCCAGTCTCCAT |
| | | | GAGGCTTGGTCAAGCCTGGAGGGTC | | CCTCCCTGTCTGCATCTGTAGGAGA |
| | | | CCTGAGACTCTCCTGTGCAGCCTCT | | CAGAGTCACCATCACTTGCCAGGCG |
| | | | GGATTCACCTTCAGTGACTACCACA | | AGTCAGGACATTAAGAAGTTTTTAA |
| | | | TGACCTGGATCCGCCAGGCTCCAGG | | ATTGGTATCAGCAGAAACCAGGGAA |
| | | | GAAGGGGCTGGAGTGGGTTTCATAC | | AGCCCCTAAGCTCCTGATCTACGAT |
| | | | ATTAGTAATAGAAGTACTTACAGAA | | GCATCCAATTTGGAGACAGGGGTCC |
| | | | ATTATGCAGACTCTGTGAAGGGCCG | | CATCAAGGTTCAGTGGAAGTGGATC |
| | | | ATTCACTATCTCCAGAGACAACGCC | | TGGGACAGATCTTACTTTCACCATC |
| | | | AAGAACTCACTGTATCTGCAAATGA | | AGCAGCCTGCAGCCTGAAGATATTG |
| | | | ACAGCCTGAGAGCCGAGGACACGGC | | CAACATATTACTGTCAACAATATGA |
| | | | CGTGTATTACTGTGCGAGAGATGGC | | TAATCTCCCTCTGACTTTTGGCCAG |
| | | | GGTGCCTACGATCGGTTTGACTACT | | GGGACCAAGCTGGAGATCAAAC |
| | | | GGGGCCAGGGAACCCTGGTCACCGT | | |
| | | | CTCCTCAG | | |
| | C924 | 769 | CAGGTGCAGCTGGTGGAGTCTGGGG | 770 | GAAATAGTGATGACGCAGTCTCCAG |
| | | | GAGGCGTGGTCCAGCCTGGGAGGTC | | CCACCCTGTCTGTGTCTCCAGGGGA |
| | | | CCTGAGACTCTCCTGTGCAGCCTCT | | AAGAGCCACCCTCTCCTGCAGGGCC |
| | | | GGATTCACCTTCAGTAGCTATGGCA | | AGTCAGAGTGTTAGCAGCAACTTAG |
| | | | TGCACTGGGTCCGCCAGGCTCCAGG | | CCTGGTACCAGCAGAAACCTGGCCA |
| | | | CAAGGGGCTGGAGTGGGTGGCAGTT | | GGCTCCCAGGCTCCTCATCTATGGT |
| | | | ATATCAGATGATGGAAGTAATAAAT | | GCATCCACCAGGGCCACTGGTATCC |
| | | | ACTATGCAGACTCCGTGAAGGGCCG | | CAGCCAGGTTCAGTGGCACTGGGTC |
| | | | ATTCACCATCTCCAGAGACAATTCC | | TGGGACAGAGTTCACTCTCACCATC |
| | | | AAGAACACGCTGTATCTGCAAATGA | | AGCAGCCTGCAGTCTGAAGATTTTG |
| | | | ACAGCCTGAGAGCTGAGGACACGGC | | CAGTTTATTACTGTCAGCAGTATAA |
| | | | TGTGTATTATTGTGCGAAAAGTTGG | | TAACTGGCCTCTCACTTTCGGCGGA |
| | | | TGGTTATCAGAGAACTGGTTCGACC | | GGGACCAAGGTGGAGATCAAAC |
| | | | CCTGGGGCCAGGGAACCCTGGTCAC | | |
| | | | CGTCTCCTCAG | | |
| | C925 | 771 | CAGGTGCAGCTGGTGGAGTCTGGGG | 772 | GAAATAGTGATGACGCAGTCTCCAG |
| | | | GAGGCGTGGTCCAGCCTGGGAGGTC | | CCACCCTGTCTGTGTCTCCAGGGGA |
| | | | CCTGAGACTCTCCTGTGCAGCCTCT | | AAGAGCCACCCTCTCCTGCAGGGCC |
| | | | GGATTC | | AGTCAG |
| | | | ACCTTCAGTAACTATGGGTTACACT | | AGTGTTAGAAGCAACTTAGCCTGGT |
| | | | GGGTCCGCCAGGCTCCAGGCAAGGG | | ACCAGCAGAGACCTGGCCAGGCTCC |
| | | | ACTGGAGTGGGTGGCAGTTACATCA | | CAGGCTCCTCATCTATGGTGCATTC |
| | | | GATGATGGAAATAGAAAATACTATG | | ACCAGGGCCACTGGTATCCCAGCCA |
| | | | CAGACTCCGTGAAGGGCCGATTCAC | | GGTTCAGTGTCAGTGGGTCTGGGAC |
| | | | CATCTCCAGAGACGATTCCAAGAAC | | AGAGTTCACTCTCACCATCGACAGC |
| | | | ACATTGTATCTGCAGATGAACAACC | | CTGCAGTCTGAAGATTTTGCAGTTT |
| | | | TGAGAACTGAGGACACGGCTGTGTA | | ATTACTGTCAGCAGTATAATAACTG |
| | | | TTACTGTGCGAAAAGTTGGTGGTTA | | GCCTCTCACTTTCGGCGGAGGGACC |
| | | | TCAGAGAACTGGTTCGACCCCTGGG | | AAGGTGGAGATCAAAC |
| | | | GCCAGGGAACCCTGGTCACCGTCTC | | |
| | | | CTCAG | | |
| | C926 | 773 | CAGGTGCAGCTGGTGGAGTCTGGGG | 774 | GACATCGTGATGACCCAGTCTCCAG |
| | | | GAGGCGTGGTCCAGCCTGGGAGGTC | | ACTCCCTGGCTGTGTCTCTGGGCGA |
| | | | CCTGAGACTCTCCTGTGCAGCCTCT | | GAGGGCCACCATCAACTGCAAGTCC |
| | | | GGATTCGGCCTCATTACCTATTCTA | | AGCCAGAGTCTTTTACCCAGCTCCA |
| | | | TGCACTGGGTCCGCCAGGCTCCAGG | | ACAGCAACAATTACTTAGCTTGGTA |
| | | | CAAGGGGCTGGAGTGGGTGGGACTT | | CCAGCAGAAATCAGGACAGCCTCCT |
| | | | ATATCATTTGATGGAAACACTACAT | | AACCTGCTCATTTACTGGGCATCTA |
| | | | ACTACGCAGACTCCGTGAGGGGCCG | | CCCGGGAATCCGGGGTCCCTGACCG |
| | | | ATTCACCATCTCCAGAGACAATTTG | | ATTCAGTGGCAGCGGGTCTGAGACA |
| | | | GCGAACATTCTGTATCTCCAAATGA | | GATTTCAGTCTCACCATCAGCAACC |
| | | | ACAGCCTGAGACCTGACGACACGGC | | TGCAGGCTGAAGATGTGGCAGTTTA |
| | | | TTTGTATTACTGTGCGAGAGATAAG | | TTACTGTCAACAATATTATAATACT |
| | | | AGGGGGGTGATTCGGGGCCTTCTTA | | CCTCACACTTTCGGCGGAGGGACCA |
| | | | ACTTCTGGGGCCAGGGATCCCTGGT | | AGGTGGAAATCA |
| | | | CACCGTCTCCTCAG | | |
| | C927 | 775 | CAGGTGCAGCTGGTGGAGTCTGGGG | 776 | TCCTATGAGCTGACTCAGCCACCCT |
| | | | GAGGCGTGGTCCAGCCTGGGAGGTC | | CAGTGTCAGTGGCCCCAGGAAAGAC |
| | | | CCTGAGACTCTCCTGTGTAGCCTCT | | GGCCAGGATTACCTGTGGGGGCAAC |
| | | | GGATTCACCTTCAGTTACTTTGACA | | AACATTGGAAGTAAAAGTGTGCACT |
| | | | TGCACTGGGTCCGCCAGGCTCCAGG | | GGTACCAGCAGAGGCCAGGCCAGGC |
| | | | CAAGGGGTTGGAGTGGGTGGCACTT | | CCCTGTGTTGGTCATCTATTATGAT |
| | | | ATATCACATGATGGAAGTACTACAT | | TCCGACCGGCCCTCTGGGATCCCTG |
| | | | TCTATGGAGACTCCGCGAGGGGCCG | | AGCGATTCTCTGGCTCCAACTCTGG |
| | | | ATTCACCATCTCCAGAGACAATTCC | | AAACACGGCCACCCTGACCATCAGC |
| | | | AGGAACACGCTGGATTTGCAAATGA | | AGGGTCGAAGCCGGGGATGAGGCCG |
| | | | ACAGCCTGAGACCTGAGGACACGGC | | ACTTCTACTGTCAGGTGTGGGATAG |
| | | | TGTGTATTTCTGTGCGAAACCTGTG | | GAGTACTAATCATCTTGTGGTATTC |
| | | | GATGCAGCTATGTTTGACTTCTGGG | | GGCGGAGGGACCCAGCTGACCGTCC |
| | | | GCCAGGGAACCCTGGTCACCGTCTC | | TAG |
| | | | CTC | | |
| | C928 | 777 | CAGGTGCAGCTGGTGGAGTCTGGGG | 778 | TCCTATGAGCTGACTCAGCCACCCT |
| | | | GAGGCGTGGTCCAGCCTGGGAGGTC | | CAGTGTCAGTGGCCCCAGGAGAGAC |
| | | | CCTGAGACTCTCCTGTGCAGCCTCT | | GGCCAGGATTACCTGTGGGGGAAAC |
| | | | GGATTCACCTTCAGTTTCTTTGACA | | AACATTGGACATAAAAGTGTGCACT |
| | | | TGCACTGGGTCCGCCAGGCTCCAGG | | GGTACCAGCAGCAGCCAGGCCAGGC |
| | | | CAAGGGGCTGGAGTGGGTGGCCGAT | | CCCTGTGTTGGTCATCTATTATGAT |
| | | | ATTTCATATGATGGAAGTAATCAAT | | AGCGAGCGGCCCTCAGGGATCCCTG |
| | | | ACTATGGAGACTCCGTGAAGGGCCG | | AACGATTCTCTGGCTCCAACTCTGG |
| | | | ATTCACCATCTCCAGAGACAATTCC | | GAACACGGCCACCCTGACCATCAGC |
| | | | AAGAGCACCTTGTATCTGCAAATGA | | AGGGTCGAAGCCGGGGATGAGGCCG |
| | | | ACAGCCTGAGAGCTGAGGACACGGC | | ACTATCACTGTCAGGTGTGGGATGG |
| | | | TGTCTATTACTGTGCGAAACCAGTG | | TGGTAATGATCATCTTGTGATATTC |
| | | | GATACAGCTATGTTTGACTCCTGGG | | GGCGGAGGGACCAAGCTGACCGTCC |
| | | | GCCAGGGAACCCTGGTCACCGTCTC | | TAG |
| | | | CTCAG | | |
| | C929 | 779 | GAGGTGCAGCTGGTGGAGTCTGGAG | 780 | GACATCCAGTTGACCCAGTCTCCAT |
| | | | GAGGCTTGATCCAGCCTGGGGGGTC | | CCTTCCTGTCTGCATCTGTAGGAGA |
| | | | CCTGAGACTCTCCTGTGCAGCCTCT | | CAGAGTCACCATCACTTGCCGGGCC |
| | | | GGGTTCACCGTCAGTAGCAACTACA | | AGTCAGGGCATTAGCAGTTATTTAG |
| | | | TGACCTGGGTCCGCCAGGCTCCAGG | | CCTGGTATCAGCAAAAACCAGGGAA |
| | | | GAAGGGGCTGGAGTGGGTCTCAGTT | | AGCCCCTAAGCTCCTGATCTATGCT |
| | | | ATTTATAGCGGTGGTACCACATACT | | GCATCCACTTTGCAAAGTGGGGTCC |
| | | | ACGCAGACTCCGTGAAGGGCCGATT | | CATCAAGGTTCAGCGGCAGTGGATC |
| | | | CACCATCTCCAGAGACAATTCCAAG | | TGGGACAGAATTCACTCTCACAATC |
| | | | AACACACTGTATCTTCAAATGAACA | | AGCAGCCTGCAGCCTGAAGATTTTG |
| | | | GCCTGAGAGCCGAGGACACGGCCGT | | CAACTTATTACTGTCAACTCCTTAA |
| | | | GTATTACTGTGCGAGAGATTTGGTG | | TAGTTACCCGTACACTTTTGGCCAG |
| | | | GTTTGGGGGATGGACGTCTGGGGCC | | GGGACCAAGCTGGAGATCAAAC |
| | | | AAGGGACCACGGTCACCGTCTCCTC | | |
| | | | A | | |
| | C930 | 781 | GAGGTGCAGCTGGTGGAGTCTGGAG | 782 | GACATCCAGTTGACCCAGTCTCCAT |
| | | | GAGGCTTGTTCCAGCCGGGGGGGTC | | CCTTCCTGTCTGCATCTGTAGGAGA |
| | | | CCTGAGACTCGCCTGTGCAGCCTCT | | CAGAGTCACCATCACTTGCCGGGCC |
| | | | GGGATCACCGTCAGTAGCAACTACA | | AGTCAGGGCATTAGCAGTTATTTAG |
| | | | TGAGCTGGGTCCGCCAGCCTCCAGG | | CCTGGTATCAGCAAAAACCAGGGAA |
| | | | GAAGGGGCTGGAGTGGGTCTCAGTT | | AGCCCCTAAGCTCCTGATCTATGCT |
| | | | ATTTATGCCGGCGGTAGCACATTCT | | GCATCCACTTTGCAAAGTGGGGTCC |
| | | | ACGCAGACTCCGTGAAGGGCCGACT | | CATCAAGGTTCAGCGGCAGTGGATC |
| | | | CACCATCTCCAGAGACAATTCCAAG | | TGGGACAGAATTCACTCTCACAATC |
| | | | AACACGCTGTATCTTCAAATAAACA | | AGCAGCCTGCAGCCTGAAGATTTTG |
| | | | GCCTGAGAGCCGAGGACACGGCCGT | | CGACTTATTACTGTCAACAGCTGAA |
| | | | GTATTACTGTGCGAGAGATTTGGTG | | TACTTACCCGTACACTTTTGGCCAG |
| | | | GTTTGGGGGATGGACGTCTGGGGCC | | GGGACCAAGCTGGAGATCAAAC |
| | | | AAGGGACCACGGTCACCGTCTCCTC | | |
| | | | A | | |
| | C931 | 783 | CAGGTGCAGCTGGTGGAGTCTGGGG | 784 | TCCTATGAGCTGACACAGCCACCCT |
| | | | GAGGCGTGGTCCAGCCTGGGAGGTC | | CAGTGTCCGTGTCCCCAGGACAGAC |
| | | | CCTGAGACTCTCCTGTGCAGCCTCT | | AGCCAGCATCACCTGCTCTGGAGAT |
| | | | GGATTCAGCTTCAGTACCTATGGCA | | AAATTGGGGGATAAATCTGCTTGCT |
| | | | TGCACTGGGTCCGCCAGGCTCCTGG | | GGTATCAGCAGAAGCCAGGCCAGTC |
| | | | CAAGGGGCTGGAGTGGGTAGCAGTC | | CCCTGTGCTGGTCATCTATCAAGAT |
| | | | ATATCATTTGATGGAAGTCAGAAAT | | AACAAGCGGCCCTCAGGGATCCCTG |
| | | | ACTATGGAGACTCCGTGAAGGGCCG | | AGCGATTCTCTGGCTCCAACTCTGG |
| | | | ATTCACCATCTCCAGAGACAATCCC | | AAACACAGCCACTCTGACCATCAGC |
| | | | AAGAACACGCTGGATCTGCAAATGA | | GGGACCCAGGCTATGGATGAGGCTG |
| | | | ACAGCCTGAGAGCTGAGGACACGGC | | ACTATTACTGTCAGGCGTGGGACAG |
| | | | TGTGTATTACTGTGCGAAAGTTGTG | | CAGCACTGCCGTTTTCGGCGGGGGG |
| | | | GTTCGGGGAGTTATTATAAGTCTCT | | ACCAAGCTGACCGTCCTAG |
| | | | ATTACGGTATGGACGTCTGGGGCCA | | |
| | | | AGGGACCACGGTCACCGTCTCCTCA | | |
| | C932 | 785 | CAGGTGCAGCTGGTGGAGTCGGGGG | 786 | TCCTATGAGCTGACTCAGCCACCCT |
| | | | GAAGCGTGGTCCAGCCTGGGAAGTC | | CAGTGTCCGTGACCCCGGGACAGAC |
| | | | CCTGAGACTCTCCTGTGCAGGCTCT | | AGCCAGCATCACCTGCTCTGGAGAT |
| | | | GGATTCGCCTTCAGCACCTATGGCA | | AAATTGGGGGATAAATATGCTTGTT |
| | | | TGCACTGGGTCCGCCAGGCTCCAGG | | GGTTTCTTCAGAAGCCAGGCCAGTC |
| | | | CAAGGGCCTGGAGTGGGTGGCAGTT | | CCCTCTGTTGGTCATCTATCAAGAT |
| | | | ATATCATCTGATGGAGGTAATAAAT | | ACCAAGCGGCCCTCAGGGATCCCAG |
| | | | ACTATGCAGACTCCGTGAAGGGCCG | | ACCGACTCTCTGGCTCCAAGTCTGG |
| | | | ATTCACCATCTCCAGAGACAACTAC | | GAACACAGCCACTCTGACCATCAGC |
| | | | GAGAACACGTTGTATCTGCAAATGA | | GGGACCCAGGCTATGGATGAG |
| | | | ACAGTCTGGGAGCTGAAGACACGGC | | GCTGACTATTACTGTCAGACGTGGG |
| | | | TGTTTATTACTGT | | ACAGCAGTGCTGTGGTTTTCGGCGG |
| | | | GCGAAAGTGGCACTTCGGGGAGTTT | | AGGGACCAAACTGACCGTCCT |
| | | | TTATAAGTCTCTACTACGGTATGGA | | |
| | | | CGTCTGGGGCCAAGGGACCACGGTC | | |
| | | | ACCGTCTCCTCA | | |
| | C933 | 787 | CAGGTGCAGCTGGTGCAGTCTGGGG | 788 | CAGTCTGTGCTGACTCAGCCACCCT |
| | | | CTGAGGTGAAGAAGCCTGGGGCCTC | | CAGCGTCTGGGACCCCCGGGCAGAG |
| | | | AGTGAAGGTCTCCTGCAAGGCTTCT | | GGTCACCATCTCTTGTTCTGGAAGC |
| | | | GGATACACCTTCACCGACTACTATA | | AGCTCCAACATCGGAAGTAATACTG |
| | | | TACACTGGGTGCGACAGGCCCCTGG | | TAAACTGGTACCAGCAGCTCCCAGG |
| | | | ACAAGGGCTTGAGTGGATGGGATGG | | AACGGCCCCCAAACTCCTCATCTAT |
| | | | ATCAATCCTAACAGTGGTGGCACAA | | AGTAATAATCAGCGGCCCTCAGGGG |
| | | | ACTATGCACAGAAGTTTCAGGGCAG | | TCCCTGACCGATTCTCTGTCTCCAA |
| | | | GGTCACCATGACCAGGGACACGTCC | | GTCTGGCACCTCAGCCTCCCTGGCC |
| | | | ATCAGCACAGCCTACATGGAGCTGA | | ATCAGTGGGCTCCAGTCTGAGGATG |
| | | | GCAGGCTGAGATCTGACGACACGGC | | AGGCTGATTATTACTGTGCAGCATG |
| | | | CGTGTATTACTGTGCGAGAGACGTT | | GGATGACAGTCTGAATGGAGTGGTA |
| | | | ATAGTTAGTATGGTTCGGGGAGTTA | | TTCGGCGGAGGGACCAAGCTGACCG |
| | | | TTTTCCGTATGGACGTCTGGGGCCA | | TCCTAG |
| | | | AGGGACCACGGTCACCGTCTCCTCA | | |
| | C934 | 789 | CAGGTGCAGCTGGTGCAGTCTGGGG | 790 | CAGTCTGTGCTGACTCAGCCACCCT |
| | | | CTGAGGTGAAGAAGCCTGGGGCCTC | | CAGCGTCTGGGACCCCCGGGCAGAG |
| | | | AGTGAAGGTCTCCTGCAAGGCTTCT | | GGTCACCATCTCTTGTTCTGGAAGC |
| | | | GGATACACCTTCACCGACTACTATA | | AGCTCCAATATCGGAAATAATACTG |
| | | | TACACTGGGTGCGACAGGCCCCTGG | | TAAACTGGTACCAGCAGTTCCCAGG |
| | | | ACAAGGGCTTGAGTGGATGGGATGG | | AACGGCCCCCAAACTCCTCATCCAT |
| | | | ATCAACCCTAACAGTGGTGGCACAA | | AGTAATAATCAGCGGCCCTCAGGGG |
| | | | ACTATGCACAGAAATTTCAGGGCAG | | TCCCTGACCGATTCTCTGGCTCCAA |
| | | | GGTCACCATGACCAGGGACACGTCC | | GTCTGGCACCTCAGCCTCCCTGGCC |
| | | | ATCAGCACAGCCTACATGGACCTGA | | ATCAGTGGGCTCCAGTCTGAGGATG |
| | | | GCAGGCTGAGATCTGACGACACGGC | | AGGCTGATTATTACTGTGCAGCATG |
| | | | CGTGTATTACTGTGCGAGAGACGTT | | GGATGACAGCCTGAATGGTGTGGTA |
| | | | ATAATTACTATGGGTCGGGGAGTTG | | TTCGGCGGAGGGACCAAGCTGACCG |
| | | | TATTCCGGATGGACGTCTGGGGCCA | | TCCTAG |
| | | | AGGGACCACGGTCACCGTCTCCTCA | | |
| | C935 | 791 | CAGGTGCAGCTGGTGGAGTCTGGGG | 792 | GACATCCAGTTGACCCAGTCTCCAT |
| | | | GAGGCGTGGTCCAGCCTGGGAGGTC | | CCTTCCTGTCTGCATCTGTAGGAGA |
| | | | CCTGAGACTCTCCTGTGCAGCGACT | | CAGAGTCACCATCGCTTGCCGGGCC |
| | | | GGATTCACTTTCAGTAGTTATGGCA | | AGTCAGGGCATTAGCAGTTATAGTA |
| | | | TGCACTGGGTCCGCCAGGCTCCAGG | | GTTATTTAGCCTGGTATCAGCAAAA |
| | | | CAAGGGGCTGGAGTGGGTGGCACTG | | ACCAGGGAAAGCCCCTAAGCTCCTG |
| | | | ATATGGTATGACGGAAGTAATCAAT | | ATCTATGCTGCATCCACTTTGCAAA |
| | | | ACTATGTAGACTCCGTGAAGGGCCG | | GTGGGGTCCCATCAAGGTTCAGCGG |
| | | | ATTCACCATCTCCAGAGACAATTCC | | CAGTGGATCTGGGACAGAATTCACT |
| | | | AAGAAGACGCTGTACCTGCAAATGA | | CTCACAATCAGCAGCCTGCAGCCTG |
| | | | ACAGCCTGAGAGTCGAGGACACGGC | | AAGATTTTGCAACTTATTACTGTCA |
| | | | TGTATATTACTGTGCGAGAGATTTT | | ACAGCTTAATAGTTACCCTCTTTTC |
| | | | AGCAATTCAGATATGGTAACTTTAA | | ACTTTCGGCCCTGGGACCAAAGTGG |
| | | | GCGATGCTTTTGATATCTGGGGCCA | | ATATCAAAC |
| | | | AGGGACAATGGTCACCGTCTCTTCA | | |
| | | | G | | |
| | C936 | 793 | GAGGTGCAGCTGGTGGAGTCTGGAG | 794 | GACATCCAGTTGACCCAGTCTCCAT |
| | | | GAGGCTTGATCCAGCCTGGGGGGTC | | CCTTCCTGTCTGCATCTGTAGGAGA |
| | | | CCTGAGACTCTCCTGTGCAGCCTCT | | CAGAGTCACCATCACTTGCCGGGCC |
| | | | GGGTTC | | AGTCAGG |
| | | | ACCGTCAGTAGTAACTACATGAGCT | | GCATTAGCAGTTATTTAGCCTGGTA |
| | | | GGGTCCGCCAGGCTCCAGGGAAGGG | | TCAGCAAAAACCAGGGAAAGCCCCT |
| | | | GCTGGAGTGGGTCTCAGTTATTTAT | | AAGCTCCTGATCTATGCTGCATCCA |
| | | | AGCGGTGGTAGCACATTCTACGCAG | | CTTTGCAAAGTGGGGTCCCATCAAG |
| | | | ACTCCGTGAAGGGCCGATTCACCAT | | GTTCAGCGGCAGTGGATCTGGGACA |
| | | | CTCCAGAGACAATTCGAAGAACACG | | GAATTCACTCTCACAATCAGCAGCC |
| | | | CTGTATCTTCAAATGAACAGCCTGA | | TGCAGCCTGAAGATTTTGCAACTTA |
| | | | GAGCCGAGGACACGGCCGTGTATTA | | TTACTGTCAACAGCTTGATAGTTAC |
| | | | CTGTGCGAGAGACCTCGGAACGGGG | | CCTCCGGGCACTTTCGGCCCTGGGA |
| | | | TTATTCGACTACTGGGGCCAGGGAA | | CCAAAGTGGATATCAAAC |
| | | | CCCTGGTCACCGTCTCCTCAG | | |
| | C937 | 795 | GAGGTGCAGCTGGTGGAGTCTGGAG | 796 | GACATCCAGTTGACCCAGTCTCCAT |
| | | | GAGGCTTGATCCAGCCTGGGGGGTC | | CCTTCCTGTCTGCATCTGTAGGAGA |
| | | | CCTGAGACTCTCCTGTGCAGCCTCT | | CAGAGTCACCATCACTTGCCGGGCC |
| | | | GAGTTAACCGTCAGTAGCAACTACA | | AGTCAGGGCATTAGCAGTTATTTAG |
| | | | TGAGCTGGGTCCGCCAGGCTCCAGG | | CCTGGTATCAGCAAAAACCAGGGAA |
| | | | GAAGGGGCTGGAATGGGTCTCAGTT | | AGCCCCTAAGCTCCTGATCTATGCT |
| | | | ATTTATCCCGGTGGTAGCACATTCT | | GCATCCACTTTACAAAGTGGGGTCC |
| | | | ACGCAGACTCCGTGAAGGGCCGATT | | CATCAAGGTTCAGCGGCAGTGGATC |
| | | | CACCATCTCCAGAGACAATTCCAAG | | TGGGACAGAATTCACTCTCACAATC |
| | | | AACACGCTGTATCTTCAAATGAACA | | AGCAGCCTGCAGCCTGAAGATTTTG |
| | | | GCCTGAGAGCCGAGGACACGGCCGT | | CAACTTATTTCTGTCAACTACTTAA |
| | | | CTATTACTGTGCGAGGGACCTGGGA | | TAGTAACCCTCCGGGCACTTTCGGC |
| | | | ACGGGGTTATTCGACTACTGGGGCC | | CCTGGGACCAAAGTGGATATCAAAC |
| | | | AGGGAACCCTGGTCACCGTCTCCTC | | |
| | | | AG | | |
| | C938 | 797 | CAGGTGCAGCTGGTGGAGTCTGGGG | 798 | GACATCCAGATGACCCAGTCTCCGT |
| | | | GAGGCGTGGTCCAGCCTGGGAGGTC | | CCTCCCTGTCTGCATCTGTAGGAGA |
| | | | CCTGAGACTCTCCTGTGCAGCCTCT | | CAGAGTCACCATCACTTGCCGGGCA |
| | | | GGATTCACCTTCCGTAGCCATGCTA | | AGTCAGAATATTAGCAACTTTTTAA |
| | | | TGCACTGGGTCCGCCAGGCTCCAGG | | ATTGGTATCAGCAGAAACCAGGGAA |
| | | | CAAGGGGCTGGAGTGGGTGGCAATT | | AGCCCCTAAGCTCCTGATCTATGCT |
| | | | ATATCATCTGACGGATTCAATAAAT | | GCATCCAGTTTGCAGAGTGGGGTCC |
| | | | ACTACGCAGACTCCGTGAAGGGCCG | | CATCAAGGTACAGTGGCAGTGGATC |
| | | | ATTCACCATCTCCAGAGACAATTCC | | TGGGACAGATTTCACTCTCACCATC |
| | | | AAGAACACGCTGTATGTCCACATGA | | AGCAGTCTACAAGCTGAAGATTTTG |
| | | | ACAGCCTGAGAGTTGAGGACACGGC | | CAACTTACTACTGTCAACAGAGTTA |
| | | | TATCTACTACTGTGCGAGCGGATTA | | CAGTACCCCGCTCACTTTCGGCGGA |
| | | | CTATGGTTCGAGACGAGAGAGATTT | | GGGACCAAGGTGGAAATCAAAC |
| | | | CGGGGGCCCCCGACTATGGGATGGC | | |
| | | | CGTCTGGGGCCAAGGGGCCACGGTC | | |
| | | | ACCGTCTCCTCA | | |
| | C939 | 799 | CAGGTGCAGCTGGTGGAGTCTGGGG | 800 | GACATCCAGATGACCCAGTCTCCAT |
| | | | GAGGCGTGGTCCAGCCTGGGAGGTC | | CCTCCCTGTCTGCATCTGTAGGAGA |
| | | | CCTGAGACTCTCCTGTGCAGCCTCT | | CAGAGTCACCATCACTTGCCGGGCA |
| | | | GGTTTCACCTTCAGTAGCTATGCTA | | AGTCAGAGCATTAGCACCTATTTAA |
| | | | TGCACTGGGTCCGCCAGGCTCCAGG | | ATTGGTATCAGCAGAAACCAGGGAG |
| | | | CAAGGGGCTGGAGTCGGTGGCACTT | | AGCCCCTAAGTTCCTGATCTATGCT |
| | | | ATATCACATGATGGAAGCAATAAAT | | GCATCCAGTTTGCAAAGTGGGGTCC |
| | | | ACCACGCAGACTCCGTGAAGGGCCG | | CATCAAGGTTCAGTGGCAGTGGATC |
| | | | ATTGACCATCTCCAGGGACACCTCC | | TGGGACAGACTTCACCCTCATCATC |
| | | | AAGAACACGCTGTATCTGCAAATGG | | AGCGGTCTGCAACCTGAAGATTTTG |
| | | | ACAGCCTGAGACCTGAAGACACGGC | | CAACTTACTTCTGTCAACAGAGTTA |
| | | | TGTGTATTACTGTGCGAGCGGATTA | | CAATACCCCGCTCACTTTCGGCGGA |
| | | | CTCTGGTTCGAGACGGCAGGGGGTT | | GGGACCAAGGTGGAGATCAAAC |
| | | | C | | |
| | | | GGGGGCCCCCGACTACGGCATGGCC | | |
| | | | GTCTGGGGCCAAGGGACCACGGTCA | | |
| | | | CCGTCTCCTCA | | |
| | C940 | 801 | CAGGTGCAGCTGCAGGAGTCCGGCT | 802 | CAGTCTGCCCTGACTCAGCCTGCCT |
| | | | CAGGACTGGTGAAGCCTTCACAGAC | | CCGTGTCTGGGTCTCCTGGACAGTC |
| | | | CCTGTCCCTCACCTGCGCTGTCTCT | | GATCACCATCTCCTGCACTGCAACC |
| | | | GGTGGCTCCGCCAGCAGTGGTGGTT | | AGCAGTGACGTTGGTGGTTATAACT |
| | | | ACTCCTGGAGCTGGATCCGGCAGCC | | TTGTCTCCTGGTACCAACAATACCC |
| | | | ACCAGGGAAGGGCCTGGAGTGGATT | | AGGCAAAGTCCCCAAACTCTTGATT |
| | | | GGATACATCTATCATAGTGGGAGTA | | TATGATGTCGGTAATCGGCCCTCAG |
| | | | CCTACTACAACCCGTCCCTCAAGAG | | GGGTTTCTAATCGCTTCTCTGGCTC |
| | | | TCGAGTCACCATATCACTAGACAGG | | CAAGTCTGGCAACACGGCCTCCCTG |
| | | | ACCAAGAAACAGTTCTCCCTGAAGC | | ACCATCTCTGGGCTCCAGGCTGAGG |
| | | | TGAGCTCTGTGACCGCCGCGGACAC | | ACGAGGCTGATTATTACTGCAGTTC |
| | | | GGCCGTGTATTACTGCGCCAGATTT | | ATATACAAACAGCAGCACGTTTTTC |
| | | | TGCCTGAGTGGGAGCCACTATTTAT | | GGCGGAGGGACCAAGCTGACCGTCC |
| | | | TTGCTTTTGATATCTGGGGCCCAGG | | TAG |
| | | | GACAATGGTCACCGTCTCTTCAG | | |
| | C941 | 803 | CAGGTGCAGCTGGTGCAGTCTGGGG | 804 | CAGTCTGTGCTGACTCAGCCGCCCT |
| | | | CTGAGGTGAAGAAGCCTGGGTCCTC | | CAGTGTCTGGGGCCCCAGGGCAGAG |
| | | | GGTGAAAGTCTCCTGCAAGGCTTCT | | GGTCACCATCTCCTGCACTGGGAGC |
| | | | GGAGGCACCTCCCGCAGCTATCCTA | | AGCTCCAACATCGGGGCAGGTTATG |
| | | | TCAGCTGGGTGCGACAGGCCCCTGG | | ATGTACACTGGTACCAGCAGCTTCC |
| | | | ACAAGGGCTTGAGTGGATGGGAAGG | | AGGAGCGGCCCCCAAACTCCTCATC |
| | | | ATCATCCCTATCGTTGGGACAGCAA | | TATCGTAACATCAATCGGCCCTCAG |
| | | | ACTACGCACAGAGGTTCCAGGGCAG | | GGGTCCCTGACCGATTCTCTGGCTC |
| | | | AGTCACGATCACCGCGGACGAATCC | | CAAGTCTGGCACCTCAGCCTCCCTG |
| | | | ACGGGCACAGCCTACATGGAGCTGA | | GCCATCACTGGGCTCCAGGCTGACG |
| | | | GCAGCCTGAGATCTGAGGACACGGC | | ATGAGGCTGATTATTACTGCCAGTC |
| | | | CGTGTATTACTGTGCGAGAAATCGC | | GTATGACAGCAGCCTGAGTGGTTCG |
| | | | GGATATAGTGACTACGGGTCGGTTT | | GTGTTCGGCGGAGGGACCAAGCTGA |
| | | | ACTACTTTGACTACTGGGGCCAGGG | | CCGTCCT |
| | | | AACCCTGGTCACCGTCTCCTCAG | | |
| | C942 | 805 | CAGGTGCAGCTGGTGGAGTCTGGGG | 806 | GACATCCAGATGACCCAGTCTCCAT |
| | | | GAGGCGTGGTCCAGCCTGGGAGGTC | | CCTCCCTGTCTGCATCTGTAGGAGA |
| | | | CCTGAGACTCTCCTGTGCAGCCTCT | | CAGAGTCAGCATCACTTGCCGGGCA |
| | | | GGATTCACCTTCAGTAGTTATGTTA | | AGTCAGAGAATTAGCAGCTATTTAA |
| | | | TGCACTGGGTCCGCCAGGCTCCAGG | | ATTGGTATCAGCAGAAACCAGGGAA |
| | | | CAAGGGGCTGGAGTGGGTGGCAATT | | AGCCCCTAAGCTCCTCATCTATGCT |
| | | | ATCTCATCTGATGGAAACACTAAAT | | GCATCCAGTTTGCAAAGTGGGGTCC |
| | | | ACTACGCAGACTCCGTGAAGGGCCG | | CATCAAGGTTCAGTGGCAGTGGATC |
| | | | ATTCACCATCTCCAGAGACAATTCC | | TGGGACAGATTTCACTCTCACCATC |
| | | | AAGAACACGTTGTATTTGCAGATGA | | AGCAGTCTGCAACCTGAAGATTTTG |
| | | | ACAGCGTGAGAACTGACGACACGGC | | CAACTTACTACTGTCAACAGAGTTA |
| | | | TGTATATTACTGTGCGAGAGATGGG | | CAGTACCCCCCCCCTCACTTTCGGC |
| | | | ACCACGATGACTCCCACGGACCTCC | | CCTGGGACCAAAGTGGATATCAAAC |
| | | | TGACTGACTGGGGCCAGGGAACTCT | | |
| | | | GGTCACCGTCTCCTCAG | | |
| | C943 | 807 | CAGGTGCAGCTGGTGGAGTCTGGGG | 808 | TCCTATGAGCTGACTCAGGCACCCT |
| | | | GAGGCGTGGTCCAGCCTGGGAGGTC | | CAGTGTCACTGGCCCCAGGAAAGAC |
| | | | CCTGAGACTCTCCTGTGCAGCCTCT | | GGCCAGGATTACCTGTGGGGAAAAC |
| | | | GGATTCCCCTTCAGTAGCTTTGGCA | | AACATTGGAAGTAAAAGTGTGCACT |
| | | | TGCACTGGGTCCGCCAGGCTCCAGG | | GGTACCAGCAGAAGCCAGGCCAGGC |
| | | | CAGGGGGCTGGAGTGGGTGGCACTT | | CCCTGTGCTGGTCATCTATTATGAT |
| | | | ATATTATATGATG | | AGTGACCGGCCCTC |
| | | | GAGATAATAAATACTATGCAGACTC | | AGGGATCCCTGAGCGATTCTCTGGC |
| | | | CGTGAAGGGCCGATTCACCATCTCC | | TCCAACTCTGGGAACACGGCCACCC |
| | | | AGAGACAATTCCAAGAACACGCTGT | | TGACCATCAGCAGGGTCGAGGCCGG |
| | | | ATCTGCAAATGAACAGCCTGAGAGC | | GGATGAGGCCGACTATTACTGTCAG |
| | | | TGAGGACACGGCTGTGTATTACTGT | | GTGTGGGATAGTAGTAGTGATCATG |
| | | | GCGAAAGATATAGGCGGGGGCAGCT | | TGATGTTCGGCGGAGGGACCAAGCT |
| | | | CGCCCCCATTTTTTGACTACTGGGG | | GACCGTCCTAG |
| | | | CCAGGGAACCCTGGTCACCGTCTCC | | |
| | | | TCAG | | |
| | C944 | 809 | CAGGTGCAGCTGGTGGAGTCTGGGG | 810 | GACATCCAGATGACCCAGTCTCCAT |
| | | | GAGGCGTGGTCCAGCCTGGGAGGTC | | CCTCCCTGTCTGCATCTGTAGGAGA |
| | | | CCTGAGACTCTCCTGTGCAGCCTCT | | CAGAGTCACCATCACTTGCCGGGCA |
| | | | GGATTCACCTTCAGTAGCTATGGCA | | AGTCAGAGCATTAGCAGCTATTTAA |
| | | | TGCACTGGGTCCGCCAGGCTCCAGG | | ATTGGTATCAGCAGAAACCAGGGAA |
| | | | CAAGGGGCTGGAGTGGGTGGCAGTT | | AGCCCCTAAGCTCCTGATCTATGCT |
| | | | ATATCATATGATGGAAGTTATAAAT | | GCATCCAGTTTGCAAAGTGGGGTCC |
| | | | ACTATGCAGACTCCGTGAAGGGCCG | | CATCAAGGTTCAGTGGCAGTGGATC |
| | | | ATTCACCATCTCCAGAGACAATTCC | | TGGGACAGATTTCACTCTCACCATC |
| | | | AAGAACACGCTGTATCTGCAAATGA | | AGCAGTCTGCAACCTGAAGATTTTG |
| | | | ACAGCCTGAGAGCTGAGGACACGGC | | CAACTTACTACTGTCAACAGAGTTA |
| | | | TGTGTATTACTGTGCGAAAGGTAGT | | CAGTACCCCCCATTCGAGTTTCGGC |
| | | | GGGAGCCAGCTCTACTACTACTACG | | CCTGGGACCAAAGTGGATATCAAAC |
| | | | GTATGGACGTCTGGGGCCAAGGGAC | | |
| | | | CACGGTCACCGTCTCCTCA | | |
| | C945 | 811 | CAGGTGCAGCTGGTGCAGTCTGGGG | 812 | GAAATTGTGTTGACACAGTCTCCAG |
| | | | CTGAGGTGAAGAAGCCTGGGGCCTC | | CCACCCTGTCTTTGTCTCCAGGGGA |
| | | | AGTGAGGATTTCTTGCAAGGCATCT | | AAGAGCCACCCTCTCCTGCAGGGCC |
| | | | GGATACACCTTCACCAACTACTATA | | AGTCAGAGTGTTAGCAGCTACTTAG |
| | | | TGCACTGGGTGCGACAGGCCCCTGG | | CCTGGTACCAACAGAAACCTGGCCA |
| | | | ACAAGGGCTTGAGTGGATGGGAATT | | GGCTCCCAGGCTCCTCATCTATGAT |
| | | | ATCAACCCTAGTGGTGGTAGCACAA | | GCATCCAACAGGGCCACTGGCATCC |
| | | | CCTACGCACCGAAGTTCCAGGCCAG | | CAGCCAGGTTCAGTGGCAGTGGGTC |
| | | | AGTCACCATGACCCGGGACACGTCC | | TGGGACAGACTTCACTCTCACCATC |
| | | | ACGAGCACAGTCTACATGGAGCTGA | | AGCAGCCTTGAGCCTGAAGATTTTG |
| | | | GCAGCCTGAGATCTGACGACACGGC | | CAATTTATTACTGTCAGCAGCGTAG |
| | | | CGTGTATTACTGTGCGAGAGATTAC | | CAACTGGCCGTACACTTTTGGCCAG |
| | | | GTACTAGTACCAGCTCGCAGCGGTA | | GGGACCAAGCTGGAGATCAAAC |
| | | | TGGACGTCTGGGGCCAAGGGACCAC | | |
| | | | GGTCACCGTCTCCTC | | |
| | C946 | 813 | CAGGTGCAGCTGGTGCAGTCTGGGG | 814 | GAAATTGTGTTGACACAGTCTCCAG |
| | | | CTGAGGTGAAGAAGCCTGGGGCCTC | | CCACCCTGTCTTTGTCTCCAGGGGA |
| | | | AGTGAAGGTTTCCTGCAAGGCATCT | | AAGAGCCACCCTCTCCTGCAGGGCC |
| | | | GGATACACCTTCACCAACTACTATA | | AGTCAGAGTGTTAGCAGCTACTTAG |
| | | | TTCACTGGGTGCGACAGGCCCCTGG | | CCTGGTACCAACAGAAACCTGGCCA |
| | | | ACAAGGGCTTGAGTGGATGGGGATA | | GGCTCCCAGGCTCCTCATCTATGAT |
| | | | ATCAACCCTGATGGTGATAGCACAA | | GCATCCAACAGGGCCACTGGCATCC |
| | | | GCTACGTACAGAAGTTCCAGGGCAG | | CAGCCAGGTTCAGTGGCAGTGGGTC |
| | | | AGTCACCATGACCAGGGACACGTCC | | TGGGACAGACTTCACTCTCACCATC |
| | | | ACGAGCACAGTCTACATGGAGCTGA | | AGCAGCCTGGAGCCTGAAGATTTTG |
| | | | GCAGCCTGAGATCTGAGGACACGGC | | CAGTTTATTACTGTCAGCAGCGTAG |
| | | | CGTGTATTACTGTGCGAGAGATTTG | | CAACTGGCTATTCACTTTCGGCCCT |
| | | | GTATTTGTACCAGCTACTAGTGCAA | | GGGACCAAAGTGGATATCAAAC |
| | | | TGGACGTCTGGGGCAAAGGGACCAC | | |
| | | | GGTCACCGTCTCCTCAG | | |
| | C947 | 815 | CAGGTGCAGCTGCAGGAGTCGGGCC | 816 | CAGTCTGTGCTGACTCAGCCGCCCT |
| | | | CAGGACTGGTGAGGCCCTCGGGGAC | | CAGTGTCTGGGGCCCCAGGGCAGAG |
| | | | CCTGTCCCTCACCTGCGCTGTCACT | | GGTCACCATCTCCTGCACTGGGAGC |
| | | | GGTGGCTCCATTAGTAGTAGTGACT | | AGCTCCAACATCGGGGCAGGTTATG |
| | | | GCTGGAGTTGGGTCCGCCAGC | | ATGTCCACTGGTACAAGCAGCT |
| | | | CCCCAGGGAAGGGGCTGGAGTGGAT | | TCCGGGAACAGCCCCCAAACTCCTC |
| | | | TGGGGAGATCTGTCATGGTAGGACT | | ATATATGGTAACACCAATCGGCCCT |
| | | | TCTAACTACAACCCGTCACTCAAGA | | CAGGGGTCCCTGGCCGATTCTCTGG |
| | | | GTCCAGTCAGCATATCAGTAGACAA | | CTCCAAGTCTGGCACCTCAGCCTCC |
| | | | GTCCAAGAACCAGTTCTCCCTGATT | | CTGGCCATCACTGGGCTCCAGGCTG |
| | | | CTGAGCTCTGTGACCGCCGCGGACA | | AGGATGAGGCTGATTATTTCTGCCA |
| | | | AGGCCGTCTATTACTGTGCGAGAAG | | GTCGTATGACACCAGGCTGAGTGTG |
| | | | TTCACGATTTTTGCCCCCCCTGCCT | | GTGTTCGGCGGAGGGACCAAGCTGA |
| | | | GATGCTTTTGATCTCTGGGGCCAAG | | CC |
| | | | GGACAATGGTCACCGTCTCTTCAG | | |
| | C948 | 817 | GAGGTGCAGCTGGTGGAGTCTGGGG | 818 | GACATCCAGATGACCCAGTCTCCAT |
| | | | GAGGCTTGGTACAGCCTGGGGGGTC | | CCTCCCTGTCTGCATCTATAGGAGA |
| | | | CCTGAGACTCTCCTGTGCAGCCTCT | | CAGAGTCACCATCACTTGCCGGGCA |
| | | | GGATTCACCTTCAGTAGATACGACA | | AGTCAGAACATTAACAGCTATTTAA |
| | | | TGCACTGGGTCCGCCAAGCTACAGG | | ATTGGTATCAGCAGAAACCAGGGAA |
| | | | AAAAGGTCTGGAATGGGTCTCAATT | | AGCCCCTAAGCTCCTGATCTATGCT |
| | | | ATTGGTACTGCTGGTGACACATACT | | GCATCCAGTTTGCAAAGTGGGGTCC |
| | | | ATCCAGGCTCCGTGAAGGGCCGATT | | CATCAAGGTTCAGTGGCAGTGGATC |
| | | | CACCATCTCCAGAGACAATGCCAAG | | TGGGACAGATTTCACTCTCACCATC |
| | | | AACTCCTTGTTTCTTCAAATGAACA | | AACAGTCTGCAACCTGAAGATTTTG |
| | | | GCCTGAGAGCCGGGGACACGGCTGT | | CAACTTACTACTGTCAACAGAGTTA |
| | | | GTATTACTGTGCAAGAGCCAACTAT | | CAGTATGCCCTCGTGGACGTTCGGC |
| | | | GATAGTAGTGGTTACCACAACTGGT | | CAAGGGACCAAGGTGGAAATCA |
| | | | TCGACCCCTGGGGCCAGGGAACCCT | | |
| | | | GGTCACCGTCTCCTCAG | | |
| | C949 | 819 | CAGGTGCAGCTGCAGGAGTCGGGCC | 820 | CAGTCTGCCCTGACTCAGCCTCGCT |
| | | | CAGGACTGGTGAAGCCTTTACAGAC | | CAGTGTCCGGGTCTCCTGGACAGTC |
| | | | CCTGTCCCTCACGTGCACTGTCTCT | | AGTCCCCATCTCCTGCACTGGAACC |
| | | | GGTGGCTCCATCAGCAATGGTGATT | | AGCAGTGATGTTGGTGGTTATGACT |
| | | | ACTACTGGAGTTGGATCCGCCAGTC | | ATGTCTCCTGGTACCAACAGCACCC |
| | | | CCCAGGGAAGGGCCTGGAGTGGATT | | AGGCAAAGCCCCCAAACTCATCATT |
| | | | GGGAACATCTTTTACAGTGGGGCCA | | TATGATGTCAGTGAGCGGCCCTCAG |
| | | | CCTACTTCAACCCGTCCCTCAAGAG | | GGGTCCCTGATCGCTTCTCTGGCTC |
| | | | TCGAGTAACCCTATCAGTGGACACG | | CAAGTCTGGCAACACGGCCTCCCTG |
| | | | TCCAAGAACCAGTTCTCCCTGAAGC | | ACCATCTCTGGGCTCCAGGCTGAGG |
| | | | TGAGCTCTGTGACTGCCGCAGACAC | | ATGAGGCTACTTATTACTGCTGCTC |
| | | | GGCCGTCTATTACTGTGCCAGAGTC | | ATATGCAGGCACCTCTGTGATGTTC |
| | | | GTCAGGGTACTCCCGGCTGCATCGG | | GGCGGAGGGACCAAGCTGACCGTCC |
| | | | TCGACTGCTGGGGCCAGGGAACCCT | | TAG |
| | | | GGTCACCGTCTCCTCAG | | |
| | C951 | 821 | CAGGTGCAGCTGCAGGAGTCGGGCC | 822 | CAGTCTGCCCTGACTCAGCCTGCCT |
| | | | CACGACTGGTGAAGCCTTCGGGGAC | | CCGTGTCTGGGTCTCCTGGACAGTC |
| | | | CCTGTCCCTCACCTGCGCTGTCTCT | | GATCACCATCTCCTGCACTGGAACC |
| | | | GGTGGCTCCATCAGCACTACTAACT | | AGCAGTGACGTTGGTGGTTATAACT |
| | | | GGTGGAGTTGGGTCCGCCAGCCCCC | | ATGTCTCCTGGTACCAACAACACCC |
| | | | AGGAAAGGGGCTGGAGTGGATTGGG | | AGGCAAAGCCCCCAACCTCATGATT |
| | | | GAAATCCATCATAGTGGGAACACCA | | TATGATGTCAGTGATCGGCCCTCAG |
| | | | ACTACAACCCGTCCCTCAAGAGTCG | | GGGTTTCTAATCGCTTCTCTGGCTC |
| | | | AGTCACCATATCAGTGGACAGGTCC | | CAAGTCTGGCAACACGGCCTCCCTG |
| | | | AAGAACCAGTTCTCCCTGAAGCTGA | | ACCATCTCTGGGCTCCAGGCTGAGG |
| | | | GCTCTGTGACCGCCGCGGACACGGC | | ACGAGGCTGATTATTACTGCAACTC |
| | | | CGTCTATTTCTGTGCGAGAGATGGA | | ATTTACAAGCAACAGCACTCGAGTC |
| | | | GGACGACCCGGGGATCCTTTTGATA | | TTCGGAACTGGGACCAAGGTCACCG |
| | | | TCTGGGGCCAAGGGACAATGGTCAC | | TCCT |
| | | | CGTCTCTTCAG | | |
| coV96 | C1025 | 823 | GAAGTGCAGCTGGTGGAGTCTGGGG | 824 | GACATCCAGATGACCCAGTCTCCAT |
| | | | GAGGCTTGGTACAGCCTGGCAGGTC | | CTTCTGTGTCTGCATCTGTAGGAGA |
| | | | CCTGAGACTCTCCTGTGCAGCCTCT | | CAGAGTCACCATCACTTGTCGGGCG |
| | | | GGATTCACCTTTGATGATTATGCCA | | AGTCAGGGTATTAGCAGCTGGTTAG |
| | | | TGCACTGGGTCCGGCAAGTTCCAGG | | CCTGGTATCAGCAGAAACCAGGGAA |
| | | | GAAGGGCCTGGAGTGGGTCTCAGGT | | AGCCCCTAAGCTCCTGATCTCTCTT |
| | | | GTTAGTTGGAATGGTGATAGCGTAG | | GCATCCAGTTTGCAAAGTGGGGTCC |
| | | | GCTATGCGGACTCTATGGAGGGCCG | | CATCAAGGTTCAGCGGCAGTGGATC |
| | | | ATTCACCATCTCCAGAGACAACGCC | | TGAGACAGATTTCACTCTCATTATC |
| | | | AAGAACTCCCTGTATCTGCAGATGA | | AGCAGCCTGCAGCCTGAAGATTTTG |
| | | | ACAGTCTGAGAACTGAAGACACGGC | | CAACTTACTATTGTCAACAGTCTAG |
| | | | CTTGTATTACTGTGCAAAAGGGGTC | | CAGTTTCCCTCTCACTTTCGGCGGA |
| | | | GACTATAGCAGTTCGAGCAACTTTG | | GGGACCAAGGTGGAAATCAAAC |
| | | | ACTTCTGGGGCCAGGGAACCCTGGT | | |
| | | | CACCGTCTCCTCAG | | |
| | C1026 | 825 | CAGGTGCAGCTGGTGGAGTCTGGGG | 826 | GACATCCAGATGACCCAGTCTCCAT |
| | | | GAGGCGTGGTCCAGCCTGGGAAGTC | | CGTCCCTGTCTGCATCTCTAGGAGA |
| | | | CCTGAGACTCTCCTGTGCAGCGTCT | | CAGAGTCACCATCACTTGCCGGGCA |
| | | | GGATTCATCTTCAGTAGCTATAGTA | | AGTCAGAGCATTAGCAACTATTTAA |
| | | | TGCATTGGGTCCGCCAGGCTCCAGG | | ATTGGTATCAGCAAAAACCAGGGAA |
| | | | CAAGGGGCTAGAGTGGGTGGCAGTT | | AGCCCCTAAGCTCCTGATCTATGGT |
| | | | GTATCAAATGATGGAAGTGGTAAAT | | GCATCCAGTTTGCAAAGTGGGGTCC |
| | | | TCTACGCAGACTCCGTGAGGGGCCG | | CATCAAGGTTCAGTGGCAGTGGATC |
| | | | ATTCACCATTTTCAGAGACAATTCC | | TGGGACAGATTTCACTCTCACCATC |
| | | | AAGAACACACTATATCTGCAAGTGA | | AGCAATCTGCAACCTGAAGATTTTG |
| | | | GCAGCCTGAGAGCTGAGGACACGGC | | CAACTTACTTCTGTCAACAGAGTTA |
| | | | TGTCTACTACTGTGCGAGAGATGCG | | CAGTACCCCTTCGGTCACTTTCGGC |
| | | | CTGACATCTATATCGGTTCTTTTTG | | GGAGGGACCAAGGTGGAGATCAAAC |
| | | | ACTGCTGGGGCCAGGGAACCCTGGT | | |
| | | | CACCGTCTCCTCAG | | |
| | C1027 | 827 | GAGGTGCAGCTGGTGGAGTCTGGGG | 828 | GACATCCAGATGACCCAGTCTCCAT |
| | | | GAGGCTTGGTCCAGCCTGGGGGGTC | | CCTCCCTGTCTGCATCTGTGGGGGA |
| | | | CTTGAGACTCTCCTGTGCAGCCTCT | | CAGAGTCACCATCACTTGCCAGGCG |
| | | | GGATTCATCGTCACCACTAATTACA | | AGTCAGGACATTAACATTTATTTAA |
| | | | TGAGCTGGGTCCGCCAGGCTCCAGG | | ATTGGTATCAGCAGAGACCGGGGAA |
| | | | GAAGGGGCTGGAGTGGGTCTCACTT | | AGCCCCTAAGCTCCTGATCTACGAT |
| | | | ATTTATCCCGGTGGTAGCACATTCT | | GCATCCAATTTACAAACGGGGGTCC |
| | | | ACGCAGACTCCGTAGAGGGCCGATT | | CATCAAGGTTCAGTGGAAGTGGATC |
| | | | CACCATCTCCAGAGACAACTCCAAG | | TGGGACAGACTTTACTATCACCATT |
| | | | AACACCTTGTATCTTCAAGTGAACA | | AGCAGCCTGCAGCCTGAAGATATTG |
| | | | GCCTGAGAGTTGAGGACACGGCTGT | | CAACATATTACTGTCAACAATATGA |
| | | | CTATTACTGTGCGAGAGATACCTTC | | TAATCTCCCTCGGAGTTTTGGCCAG |
| | | | GGTAGGGGGGACGACCACTGGGGCC | | GGGACCAAGCTGGAGATC |
| | | | AGGGAACCCTGGTCACCGTCTCCTC | | |
| | | | AG | | |
| | C1028 | 829 | CAGGTGCAGCTGGTGGAGTCTGGGG | 830 | GACATCCAGATGACCCAGTCTCCAT |
| | | | GAGGCGTGGTCCAGCCTGGGAGGTC | | CCTCCCTGTCTGCATCTGTAGAAGA |
| | | | CCTGAGACTCTCCTGTGCAGACTCT | | CAGAGTCACCATCACTTGCCGGGCA |
| | | | GGATTCACCTTCAGTAGCTCTGGCA | | AGTCAGAGCATTAGCAGCTATTTAA |
| | | | TGCACTGGGTCCGCCAGGCACCAGG | | ATTGGTATCAGCAGAAGCCAGGGAA |
| | | | CAAGGGGCTGGAGTGGGTGGGAGTT | | AGCCCCTAAACTCCTGATCTATGCT |
| | | | ATATCATATGATGGTGGTAATAAAT | | GCAATCAGTTTGCAGAGTGGGGTCC |
| | | | ACTATGCAGACTCCGTGAAGGGCCG | | CATCAAGGTTCAGTGGCAGTGGATC |
| | | | ATTCACCATCTCCAGAGACAATTCC | | TGGGACAGAGTTCACTCTCACCATC |
| | | | AAGAACACGCTGTATCTGCAAATGA | | AGCAGTCTGCAACCTGAAGATTTTG |
| | | | ACAGCCTGAGAGCAGAGGACACGGC | | CAACTTACTACTGTCAACAGAGTTA |
| | | | TGTGTATTACTGTGCGAAAGATACC | | CACTACCCCCTGGGCGTTCGGCCAA |
| | | | CCCGGAGGGGACGATATTATGACTG | | GGGACCAAGGTGGAAATCAAAC |
| | | | GCT | | |
| | | | GGGGGTTATACGGTATGGACGTCTG | | |
| | | | GGGCCAAGGGACCACGGTCACCGTC | | |
| | | | TCCTCA | | |
| | C1029 | 831 | CAGGTGCAGCTGGTGGAGTCTGGGG | 832 | GACATCCAGATGACCCAGTCTCCAC |
| | | | GAGGCGTGGTCCAGCCTGGGAGGTC | | CCTCCCTGTCTGCAGCTGTAGGAGA |
| | | | CCTGAGACTCTCCTGTGCAGCGTCT | | CAGAGTCACCATCACTTGCCGGGCA |
| | | | GGATTCACCTTCAGTAGTTTTGGCA | | AGTCAGAGCATTAGCAGCTATTTAA |
| | | | TGCACTGGGTCCGCCAGGCTCCAGG | | ATTGGTATCAGCAGAAACCAGGGAA |
| | | | CAAGGGGCTGGAGTGGGTGGCAGTT | | AGCCCCTAAGCTCCTGATCTATGCT |
| | | | ATATCGTATGATGGAAGTTATAAAG | | GCATCCAGTTTGCAAAGTGGGGTCC |
| | | | ACTATGGAGACTCCGTGAAGGGCCG | | CATCAAGGTTCAGTGGCAGTGGATC |
| | | | ATTCACCATCTCCAGAGACAATTCC | | TGGGACAGATTTCACTCTCACCATC |
| | | | AAGAACACGCTGTATCTGCAAATGA | | AGCAGTCTGCAACCTGAAGATTTTG |
| | | | ACAGCCTGAGAGCCGAGGACACGGC | | CAACTTACTACTGTCAACAGAGTTA |
| | | | TGTGTATTACTGTGCGAGAGACAGC | | CAGTACCCCTCCCTGGACGTTCGGC |
| | | | AACGTGGATACAGTTATGGTGACGT | | CAAGGGACCAAGGTGGAAATCAAAC |
| | | | GGTTTGACTACTGGGGCCGGGGAAC | | |
| | | | CCTGGTCACCGTCTCCTCAG | | |
| | C1030 | 833 | GAGGTGCAGCTGGTGGAGTCTGGGG | 834 | GACATCCAGTTGACCCAGTCTCCAT |
| | | | GAGGCTTGGTCCAGCCTGGGGGGTC | | CCTTCCTGTCTGCATCTGTAGGAGA |
| | | | CCTGAGACTCTCCTGTGAAGCCTCT | | CAGAGTCACCATCACTTGCCGGGCC |
| | | | GGAGTCATCGTCAGTAGCAACTACA | | AGTCAGGGCATTAACAGTGATTTAG |
| | | | TGAACTGGGTCCGCCAGGCTCCAGG | | CCTGGTATCAGCAAAAACCAGGGAA |
| | | | GAAGGGGCCGGAGTGGGTCTCAGTT | | AGCCCCTAAGCTCCTGATCTATGGT |
| | | | CTCTATGCCGGTGGTAGCACATTCT | | GCATCCACTTTGCAAAGTGGGGTCC |
| | | | ACGCAGACTCCGTGAAGGGCCGATT | | CATCAAGGTTCAGCGGCAGTGGATC |
| | | | CACCATCTCCAGAGACGATTCCAAG | | TGGGACAGAGTTCAGTCTCACGGTC |
| | | | AACACACTGTTTCTTCAAATGAACA | | AGCAGCCTGCAGCCTGAAGATTTTG |
| | | | ACCTGAGAGCTGAGGACACGGCTGT | | CAACTTATTACTGTCAACAACTTAA |
| | | | CTATTTCTGTGCGAGAGATTTGATT | | TAGTTACCGAAGGTTCGGCGGCGGG |
| | | | GCATTCGGAATGGATGTCTGGGGCC | | ACCAAGGTGGAGATCAAAC |
| | | | AAGGGACCACGGTCACCGTCTCCTC | | |
| | | | A | | |
| | C1031 | 835 | CAGCTGCAGCTGCAGGAGTCGGGCC | 836 | CAGTCTGCCCTGACTCAGCCTCCCT |
| | | | CAGGACTGGTGAAGCCTTCGGAGAC | | CCGCGTCCGGGTCTCCTGGACAGTC |
| | | | CCTGTCCCTCACCTGCACTGTCTCT | | AGTCACCATCTCCTGCACTGGAACC |
| | | | GGTGGCTCCATCAATACTAGTACTT | | AGCAGTGACGTTGGTAGTTATAACT |
| | | | ACTACTGGGGCTGGATCCGCCAGCC | | ATGTCTCCTGGTACCAACAGCACCC |
| | | | CCCAGGGAAGGGGCTGGAGTGGATT | | AGGCAAAGCCCCCAAACTCATGATT |
| | | | GGGAATATCTATTATAGTGGGATCA | | TATGAGGTCACTAAGCGGCCCTCAG |
| | | | CCTACTACAACCCGTCCCTCAAGAG | | GGGTCCCTGATCGCTTCTCTGGCTC |
| | | | TCGAGTCACCATATCCGTAGACACG | | CAAGTCTGGCAACACGGCCTCCCTG |
| | | | TCCAAGAACCAGTTCTCCCTGAAGC | | ACCGTCTCTGGGCTCCAGGCTGACG |
| | | | TGAGGTCTGTGACCGCCGCAGACAC | | ATGAGGCTGATTATTACTGCAGTTC |
| | | | GGCTGTGTATTACTGTGCGAGACAA | | ATATGCAGGCAGCAGCAATTTGGTA |
| | | | CATCGTTTTGGTTCGGGGAGTTCTG | | TTCGGCGGAGGGACCAAGCTGACCG |
| | | | AGCTTCTGTGGGGCCAGGGAACCCT | | TCCT |
| | | | GGTCACCGTCTCCTCAG | | |
| | C1032 | 837 | GAGGTGCAGCTGGTGGAGTCTGGGG | 838 | GACATCCAGATGACCCAGTCTCCAT |
| | | | GAAGCTTGGTAAAGCCTGGGGGGTC | | CCTCCCTGTCTGCATCTGTAGGAGA |
| | | | CCTAAGACTCTCCTGTGTAGCCTCT | | CAGAGTCACCATCACTTGCCGGGCA |
| | | | GGACTCACTTTCAATCACGCCTGGA | | AGTCAGGCCATTGCCACCTTTTTAA |
| | | | TGAGCTGGGTCCGCCAGGCTCCAGG | | ATTGGTATCAGCAGAAACCAGGGAA |
| | | | GAAGGGGCTGGAGTGGGTTGGCCGT | | AGCCCCTAAGCTCCTGATCTATGCT |
| | | | ATTAAAAGTAAAATTGATGGTGGGA | | GCGTCCAGTTTACAAAGTGGGGTCC |
| | | | CAACAGACTACGCTGCACCCGTGAA | | CATCAAGGTTCAGTGGCAGTGGATC |
| | | | AGGC | | AGGGACA |
| | | | AGATTCACCATCTCAAGAGATGATT | | GATTTCACTCTCACCATCAGCAGTC |
| | | | CAAAAAGCACGCAGTATCTGCAAAT | | TGCAACCTGAAGATTTTGCGACTTA |
| | | | GAACAGCCTGAAAACCGAGGACACA | | CTACTGTCAACAGAGTTACAATTCC |
| | | | GCCGTATATTACTGTACCACAGATT | | CTTCACTTCGGCGGAGGGACCAAGG |
| | | | GCTTTTGGCGCCTCGGGGGCACCAC | | TGGAGATCAAAC |
| | | | CTGCTACGAGCACGATGCTTTTGAT | | |
| | | | GTCTGGGGCCAAGGGACAATGGTCA | | |
| | | | CCGTCTCTT | | |
| | C1033 | 839 | CAGGTGCAGCTGGTGCAGTCTGGGG | 840 | GAAATTGTGTTGACGCAGTCTCCAG |
| | | | CTGAGGTGAAGAAGCCTGGGTCCTC | | GCACCCTGTCTTTGTCTCCAGGGGA |
| | | | GGTGAAGGTCTCCTGCAAGGCTTCT | | AAGAGCCACCCTCTCCTGCAGGGCC |
| | | | GGAGGCACCTTCAGCAGGAATGTCA | | AGTCAGAGTGTTAGCAGCAACTACT |
| | | | TCAGCTGGGTGCGACAGGCCCCTGG | | TAGCCTGGTACCAGCAGAAGCCTGG |
| | | | ACAAGGGCTTGAGTGGATGGGAGGG | | CCAGGCTCCCAGGCTCCTCATCTAT |
| | | | ATCATCCCTATGTTTGGTACAGCAA | | GATGCATCTAGCAGGGCCACTGGCA |
| | | | ACTATGCACAGAAGTTTCAGGGCAG | | TCCCAGACAGGTTCAGTGGCAGTGG |
| | | | AGTCACGATAAGCGCGGACGAATCC | | GTCTGGGACAGACTTCACTCTCACC |
| | | | ACGAGCACAGCCTACATGGAGCTGA | | ATCAGGAGACTGGAGCCTGAAGATT |
| | | | GCAGCCTGAGATCTGAGGACACGGC | | TTGCAGTGTATTACTGTCAGCAGTA |
| | | | CGTGTATTACTGTGCGAGAGAAGAT | | TGGTGGCTCACCTCGCACGTTCGGC |
| | | | TTCATACTAGAATCAGCTCCTATAC | | CAAGGGACCAAGGTGGAAATCAAAC |
| | | | GAGAAAATTCCTACTACTACTACGG | | |
| | | | TATGGACGTCTGGGGCCAAGGGACC | | |
| | | | ACGGTCACCGTCTCCTCA | | |
| | C1034 | 841 | CAGCTGCAGCTGCAGGAGTCGGGCC | 842 | GACATCCAGATGACCCAGTCTCCAT |
| | | | CAGGACTGGTGAAGCCTTCGGAGAC | | CCTCCCTGTCTGCATCTGTAGGAGA |
| | | | CCTGTCCCTCACCTGCACTGTCTCT | | CAGAGTCACCATCACTTGCCGGGCA |
| | | | GGTGGCTCCGTCAGCAGTAATAATC | | AGTCAGACCATTAACAACTATTTAA |
| | | | ACTACTGGGGCTGGATCCGCCAGCC | | ATTGGTATCAACAGAAACCAGGGAA |
| | | | CCCAGGGAAGGGGCTGGAGTGGATT | | ACCCCCTAAGCTCCTGATCTATGCT |
| | | | GGGAGTATCTCTTCTAGTGGGAGCA | | GCATTCAGTTTGCACAGTGGGGTCC |
| | | | CCCACCACAACCCGTCCCTCAGGAG | | CATCAAGGTTCAGTGGCAGTAGATC |
| | | | TCGAGTCACCATATCCGTAGACACG | | TGGGACAGATTTCACTCTCACCATC |
| | | | TCGAAGAACCACTTCTCCCTGAAGC | | AGTAGTCTGCAACCTGAAGATTTTG |
| | | | TGAACTCTGTGACCGCCACTGACAC | | CAACTTACTACTGTCAACACAGTTA |
| | | | GGCTGTGTATTACTGTGCGAGAGTG | | CAGTACGATGTGCAGTTTTGGCCAG |
| | | | GATAGCAGTGGCTGGTACACGGGGG | | GGGACCAAGCTGGAGATCAAAC |
| | | | ATGTTTTTGATGTCTGGGGCCAAGG | | |
| | | | GACAATGGTCACCGTCTCTTCAG | | |
| | C1035 | 843 | GAGGTGCAGCTGGTGGAGTCTGGAG | 844 | GAAATTGTGTTGACGCAGTCTCCAG |
| | | | GAGGCTTGATCCAGCCTGGGGGGTC | | GCACCCTGTCTTTGTCTCCAGGGGA |
| | | | CCTGAGACTCTCCTGTGCAGCCTCT | | AAGAGCCACCCTCTCCTGCAGGGCC |
| | | | GGGCTCACCGTCAGTAGGAACTACA | | AGTCAGAGTTTTAGCAGCACCTACT |
| | | | TGAACTGGGTCCGCCAGGCCCCAGG | | TAGCCTGGTACCAGCAGAAGCCTGG |
| | | | GAAGGGGCTGGAGTGGGTCTCAGTT | | CCAGGCTCCCAGGCTCCTCATCTAT |
| | | | ATGTATAGCGGTGGTAGCACATTCT | | GGTGCATCCAGCAGGGCCACTGGCA |
| | | | ACGCAGACTCCGTGAAGGGCCGATT | | TCCCAGACAGGTTCAGTGGCAGTGG |
| | | | CACCATCTCCAGAGACAATTCCAAG | | GTCTGGGACAGACTTCACTCTCACC |
| | | | AACACGCTATATCTTCAAATGAACA | | ATCAGCAGACTGGAGCCTGAAGATT |
| | | | GCCTGAGAGCCGAGGACACGGCCGT | | TTGCAGTGTATTACTGTCAGCAGTA |
| | | | GTATTACTGTGCGAGAGAAAGCTAC | | TGTTACCTCACCGTGGACGTTCGGC |
| | | | GGTATGGACGTCTGGGGCCAAGGGA | | CAAGGGACCAAGGTGGAAATCAAAC |
| | | | CCACGGTCACCGTCTCCTCA | | |
| | C1036 | 845 | GAGGTGCAGCTGGTGGAGTCTGGAG | 846 | GAAATTGTGTTGACGCAGTCTCCAG |
| | | | GAGGCTTGATCCAGCCTGGGGGGTC | | GCACCCTGTCTTTGTCTCCAGGGGA |
| | | | CCTGAGACTCTCCTGTGCAGCCTCT | | AAGAGCCACCCTCTCCTGCAGGGCC |
| | | | GGGCTCATCGTCAGTAGGAACTACA | | AGTCAGAGTATTAGCAGCACCTACT |
| | | | TGAACTGGGTCCGCCAGGTTCCCGG | | TAGCCTGGTACCAGCAGAAACCTGG |
| | | | GAAGGGGCTGGAGTGGGTCTCAGTT | | CCAGGCTCCCAGGCTCCTCATCTAT |
| | | | ATGTATGCCGGTGGAAGCACATTCT | | GGTGCATCCAGCAGGGCCACTGGCA |
| | | | ACGCAGACTCCGTGAAGGGCCGATT | | TCCCAGACAGGTTCAGTGGCAGTGG |
| | | | CACCATCTCCAGAGACGATTCCAAG | | GTCTGGGACAGACTTCACTCTCACC |
| | | | AACACGCTGTATCTTCAAATGAACA | | ATCAGCAGACTGGAGCCTGAAGATT |
| | | | GCCTGAGACCCGAGGACACGGCCGT | | TTGCAGTGTATTACTGTCAGCAGTA |
| | | | GTATTACTGTGCGAGAGAAAGTTAC | | TGTTACCTCACCGTGGACGTTCGGC |
| | | | GGTATGGACGTCTGGGGCCAAGGGA | | CAAGGGACCAAGGTGGAAATCAAAC |
| | | | CCACGGTCACCGTCTCCTCA | | |
| | C1038 | 847 | CAGGTGCAGCTGGTGCAGTCTGGGG | 848 | TCCTATGAGCTGACTCAGCCACCCT |
| | | | CTGAGGTGAAGAAGCCTGGGGCCTC | | CGGTGTCAGTGGCCCCAGGAAAGAC |
| | | | AGTGAAGGTTTCCTGCAAGGCATCT | | GGCCAGGATTACCTGTGGGGGAAAC |
| | | | GGATACACCTTCACCAGCTACTATA | | AACATTGGAAGTAAAAGTGTGCACT |
| | | | TGCACTGGGTGCGACAGGCCCCTGG | | GGTACCAGCAGAAGCCAGGCCAGGC |
| | | | ACAAGGGCTTGAGTGGATGGGAATA | | CCCTGTGCTGGTCGTCTATGATGAT |
| | | | ATCAACCCTAGTGGTGGTAGCACAA | | AGCGACCGGCCCTCAGGGATCCCTG |
| | | | GGTACGCACAGAAGTTCCAGGGCAG | | AGCGATTCTCTGGCTCCAACTCTGG |
| | | | AGTCACCATGACCAGGGACACGTCC | | GAACACGGCCACCCTGACCATCAGC |
| | | | ACGAGCACAGTCTACATGGAGCTGA | | AGGGTCGAAGCCGGGGATGAGGCCG |
| | | | GCAGCCTGAGATCTGAGGACACGGC | | ACTATTACTGTCAGGTGTGGGATAG |
| | | | CGTGTATTACTGTGCGAGAGAAGGA | | TAGTAGTGATCCTTATGTCTTCGGA |
| | | | GTGGGAGGTACTTCCTACTTTGACT | | ACTGGGACCAAGGTCACCGTCCTAG |
| | | | ACTGGGGCCAGGGAACCCTGGTCAC | | |
| | | | CGTCTCCTCAG | | |
| | C1039 | 849 | CAGGTGCAGCTGGTGCAGTCTGGGG | 850 | TCCTATGAGCTGACTCAGCCACCCT |
| | | | CTGAGGTGAAGAAGCCTGGGGCCTC | | CGGTGTCAGTGGCCCCAGGAAAGAC |
| | | | AGTGAAGGTTTCCTGCAAGGCATCT | | GGCCGGGATTACCTGTGGGGGAAGC |
| | | | GGATATACCTTCACCAGCCACTATA | | GACATTGGAAGTAAAAGTGTGCACT |
| | | | TGCACTGGGTGCGACAGGCCCCTGG | | GGTACCAGCAGAAGCCAGGCCAGGC |
| | | | ACAAGGGCTTGAGTGGATGGGAATA | | CCCTGTGCTGGTCGTCTATGATGAT |
| | | | ATCAACCCTAGGACAAGATACGCAC | | AGCGACCGGCCCTCAGGGATCCCTG |
| | | | AGATGTTCCAGGGCAGAGTCAGCAT | | AGCGATTCTCTGGCTCCAACTCTGG |
| | | | GAACAGGGACACGTCCACGAGCACA | | GAACACGGCCACCCTGACCATCAGC |
| | | | GTCTACATGGAGCTGAGCAGCCTGA | | AGGGTCGAAGCCGGGGATGAGGCCG |
| | | | CATCTGAGGACACGGCCGTCTATTA | | ACTATTACTGTCAGGTGTGGGATAG |
| | | | CTGTGCGAGAGAAGGACTGGGAGCT | | TAGTAGTGATCCTTATGTCTTCGGA |
| | | | ACTGCCTACTTTGACTACTGGGGCC | | ACTGGGACCAAGGTCTCCGTCCTAG |
| | | | AGGGAACCCTGGTCACCGTCTCCTC | | |
| | | | AG | | |
| | C1040 | 851 | CAGGTGCAGCTGGTGGAGTCTGGGG | 852 | GATGTTGTGATGACTCAGTCTCCAC |
| | | | GAGGCGTGGTCCAGCCTGGGAGGTC | | TCTCCCTGCCCGTCACCCTTGGACA |
| | | | CCTGAGACTCTCCTGTGCAGCGTCT | | GGCGGCCTCCATCTCCTGCAGGTCT |
| | | | GGATTCAGCTTCATTAACTATAACA | | AGTCAAAGCCTCGTACACAGTGATG |
| | | | TGCACTGGGTCCGCCAGGCTCCAGG | | GAAACACCTACTTGAATTGGTTTCA |
| | | | CAAGGGGCTGGAGTGGGTGGCAGTT | | GCAGAGGCCAGGCCAATCTCCAAGG |
| | | | ATATGGTATGATGGAAGCAATAAAT | | CGCCTAATTTATAGGGTTTCTAACC |
| | | | ACTATGCAGACTCCGTGAAGGGCCG | | GGGACTCTGGGGTCCCAGACAGATT |
| | | | ATTCACCATCTCCAGAGACAATTCC | | CAGCGCCAGTGGGTCAGGCACTGAT |
| | | | AAGAACACGCTGTATCTGCAAATGA | | TTCACACTGAAAATCAGCAGGGTGG |
| | | | ACAGCCTGAGAGTCGAGGATACGGC | | AGGCTGAAGATGTTGGGGTTTATTA |
| | | | TGTTTATTACTGT | | CTGCATGCAAGGT |
| | | | GCGAGAGACCCGGCTATAACAGAGG | | ACACACTGGCCCTGGACGTTCGGCC |
| | | | CAGAGATTGACTACTGGGGCCAGGG | | AAGGGACCAAGGTGGAAATCAAAC |
| | | | GACCCTGGTCACCGTCTCCTCAG | | |
| | C1041 | 853 | CAGGTGCAGCTGGTGCAGTCTGGGG | 854 | GAAATTGTGTTGACACAGTCTCCAG |
| | | | CTGAGGTGAAGAAGCCTGGGGCCTC | | CCACCCTGTCTTTGTCTCCAGGGGA |
| | | | AGTGAAGGTTTCCTGCAAGGCGTCT | | AAGAGCCACCCTCTCCTGCAGGGCC |
| | | | GGATACACCTTCAGCGACCACTATA | | AGTCAGAGTGTTAGCAGGTACTTAG |
| | | | TTTACTGGGTGCGACAGGCCCCTGG | | CCTGGTACCAACAGAAACCTGGCCA |
| | | | ACAAGGGCTTGAGTGGATGGGAATA | | GGCTCCCAGGCTCCTCATCTATGAT |
| | | | ATCAACCCTAGCGCTGGTAGCACAA | | GCATCCAACAGGGCCACTGGCATCC |
| | | | GCTACGCACAGAAGTTCCAGGGCAG | | CAGCCAGGTTCAGTGGCAGTGGGTC |
| | | | AGTCACCATGACCAGGGACACGTCC | | TGGGACAGACTTCACTCTCACCATC |
| | | | ACGAGCACAGTTTACATGGAGCTGA | | AGCAGCCTAGAGCCTGAAGATTTTG |
| | | | GCAGCCTGAGATCTGAGGACACGGC | | CAGTTTATTACTGTCAACAGCGTAG |
| | | | CGTCTATTACTGCGCTAGAGATATT | | CAACTGGCTATTCACTTTCGGCCCT |
| | | | GTATTCGTACCAGCTACTATGGCTA | | GGGACCAAAGTGGATATCAAAC |
| | | | TGGACGTCTGGGGCCTAGGGACCAC | | |
| | | | GGTCACCGTCTCCTCA | | |
| | C1042 | 855 | CAGGTGCAGCTGGTGCAGTCTGGGG | 856 | GAAATTGTGTTGACACAGTCTCCAG |
| | | | CTGAGGTGAAGAAGCCTGGGGCCTC | | CCACCCTGTCTTTGTCTCCAGGGGA |
| | | | AGTGAAGGTTTCCTGCAAGGCGTCT | | AAGAGCCACCCTCTCCTGCAGGGCC |
| | | | GGATACACCTTCAGCGACCACTATA | | AGTCAGAGTGTTAGCAGGTACTTAG |
| | | | TTTACTGGGTGCGACAGGCCCCTGG | | CCTGGTACCAACAGAAACCTGGCCA |
| | | | ACAAGGGCTTGAGTGGATGGGAATA | | GGCTCCCAGGCTCCTCATCTATGAT |
| | | | ATCAACCCTAGTGGTGGTAGCACAA | | GCATCCAACAGGGCCACTGGCATCC |
| | | | GCTACGCACAGAAGTTCCAGGGCAG | | CAGCCAGGTTCAGTGGCAGTGGGTC |
| | | | AGTCACCATGACCAGGGACACGTCC | | TGGGACAGACTTCACTCTCACCATC |
| | | | ACGAGCACAGTCTACATGGAGCTGA | | AGCAGCCTAGAGCCTGAAGATTTTG |
| | | | GCAGCCTGAAATCTGAGGACACGGC | | CAGTTTATTACTGTCAGCAGCGTAG |
| | | | CGTCTATTACTGTTCTAGAGATATT | | CAACTGGCTATTCACTTTCGGCCCT |
| | | | GTATTCGTACCAGCTACTATGGCTA | | GGGACCAAAGTGGATATCAAAC |
| | | | TGGACGTCTGGGGCCAAGGGACCAC | | |
| | | | GGTCACCGTCTCCTCA | | |
| | C1043 | 857 | GAAGTGCAGCTGGTGGAGTCTGGGG | 858 | CAGTCTGCCCTGACTCAGCCTGCCT |
| | | | GAGGCTTGGTACAGCCTGGCAGGTC | | CCGTGTCTGGGTCTCCTGGACAGTC |
| | | | CCTGAGACTCTCCTGTGCAGCCTCT | | GATCACCATCTCCTGCACTGGAACC |
| | | | GGATTCATCTTTGATAATTATGCCA | | AGTAGTGACATTGGTGGTAATAATT |
| | | | TGCACTGGGTCCGGCAAGCTCCAGG | | ATGTCTCCTGGTATCAACAACACCC |
| | | | GAAGGGCCTGGAGTGGGTCTCAGGT | | AGGCAAAGCCCCCAGACTCATGATT |
| | | | ATCAGTTGGAATAGTGATAGCATAG | | TTTGATGTCAGTTATCGGCCCTCAG |
| | | | GCTATGCGGACTCTGTGAAGGGCCG | | GGGTTTCTAATCGCTTCTCTGGCTC |
| | | | ATTCACCATCTCCAGAGACAACGCC | | CAAGTCTGGCAACACGGCCTCCCTG |
| | | | AAGAACTCCCTCTATCTGCAAATGA | | ACCATCTCTGGGCTCCAGGCTGAGG |
| | | | GCAGTCTGAGAGCTGAGGACACGGC | | ACGAGGCTGATTATTATTGCATCTC |
| | | | CTTGTATTACTGTGCAAAAGATCTC | | ATATACAACCAGCAGCACTCTCGGG |
| | | | CTAGGGAACTACTACTACTACACTT | | GTCTTCGGCGGAGGGACCAAGCTGA |
| | | | TGGACGTCTGGGGCCAAGGGACCAC | | CCGTCCTA |
| | | | GGTCACCGTCTCCTCA | | |
| | C1044 | 859 | CAGGTGCAGCTGCAGGAGTCGGGCC | 860 | TCCTATGAGCTGACACAGCCACCCT |
| | | | CAGGATTGGTGAAGCCTTCACAGAC | | CGGTGTCAGTGGCCCCAGGAAAGAC |
| | | | CCTGTCCCTCACCTGCACTGTCTCT | | GGCCAGGATTACCTGTGGGGGAAAC |
| | | | GGTGGCTCCATCAGTAGTGGTAATT | | AACATTGGAAGTAAAAATGTGCACT |
| | | | ACTACTTGACCTGGATCCGGCAGCC | | GGTACCAGCAGAAGCCAGGCCAGGC |
| | | | CGCCGGGAAGGGACTGGAGTGGATT | | CCCTGTGCTGGTCGTCTATGATGAT |
| | | | GGGCATATCTATACCAGTGGGAGCA | | AGCGACCGGCCCTCAGGGATCCCTG |
| | | | CCAACTACAACCCCTCCCTCAAGAG | | AGCGATTCTCTGGCTCCAACTCTGG |
| | | | TCGAGTCACCATATCAGTAGACACG | | GAACACGGCCACCCTGACCATCAGC |
| | | | TCCATGAACCAGTTCTCCCTGA | | AGGGTCGAAGCCGGGGATGA |
| | | | AGCTGAGCTCTGTGACCGCCGCAGA | | GGCCGGCTATTACTGTCAGGTGTGG |
| | | | CACGGCCGTGTATTACTGTGCGAGA | | GATAGTACTAGTGATCATCTTTTTT |
| | | | GACATCCCGCCAACCTGGTACTTCG | | GGGTGTTCGGCGGAGGGACCAAGCT |
| | | | ATCTCTGGGGCCGTGGCACCCTGGT | | GACCGTCCTAG |
| | | | CACCGTCTCCTCAG | | |
| | C1045 | 861 | CAGGTGCAGCTGCAGGAGTCGGGCC | 862 | TCCTATGAGCTGACTCAGCCACCCT |
| | | | CAGGATTGGTGAAGCCTTCACAGAC | | CGGTGTCAGTGGCCCCAGGAAAGAC |
| | | | CCTGTCCCTCACCTGCACTGTCTCT | | GGCCAGGATTCCCTGTGGGGGAACC |
| | | | GGTGACTCCATCAGCAGTGGTAATT | | GACATTGGAAGTAAAAATGTGCACT |
| | | | ACTACTGGAGCTGGATCCGGCAGCC | | GGTACCAGCAGAAGCCAGGCCAGGC |
| | | | CGCCGGGAAGGGACTGGAGTGGATT | | CCCTGTGCTGGCCGTCTATGATGAT |
| | | | GGGCATATCTATACCAGTGGGAGCC | | AGCGACCGGCCCTCAGGGATCCCTG |
| | | | CCAACTACAAGCCCTCCCTCAAGAG | | AGCGATTCTCTGGCTCCAACTCTGG |
| | | | TCGAGTCACCATATCACTAGACACG | | GAGCACGGCCACCCTGACCATCAGC |
| | | | TCCAAGAATCAGTTCTCCCTGAAGC | | AGGGTCGAAGCCGGGGATGAGGCCG |
| | | | TGACCTCTGTGACCGCCGCAGACAC | | ACTATTACTGTCAGGTGTGGGATAG |
| | | | GGCCATGTATTACTGTGCGAGAGAC | | TAGTGGTGATCGTCTCTCTTGGGTG |
| | | | ATCCCGTCAACCTGGTACTTCGATC | | TTCGGCGGAGGGACCAAGCTGACCG |
| | | | TCTGGGGCCGTGGCACCCTGGTCAC | | TCCTAG |
| | | | CGTCTCCTCAG | | |
| | C1046 | 863 | GAGGTGCAGCTGGTGCAGTCTGGAG | 864 | GACATCCAGTTGACCCAGTCTCCAT |
| | | | CAGAGGTGAAAAAGCCCGGGGAGTC | | CCTCCCTGTCTGCATCTGTAGGAGA |
| | | | TCTGAAGATCTCCTGTAAGGGTTCT | | CAGAGTCACCATCACTTGCCGGGCA |
| | | | GGATACAGCTTTACCAGCTACTGGA | | AGTCAGGGCATTAGCAGTGCTTTAG |
| | | | TCGGCTGGGTGCGCCAGATGCCCGG | | CCTGGTATCAGCAGAAACCAGGGAA |
| | | | GAAAGGCCTGGAGTGGATGGGGATC | | AGCTCCTAAGCTCCTGATTTATGAT |
| | | | ATCTATCCTGGTGACTCTGATACCA | | GCCTCCAGTTTGGAAAGTGGGGTCC |
| | | | GATACAGCCCGTCCTTCCAAGGCCA | | CATCAAGGTTCAGCGGCAGTGGATC |
| | | | GGTCACCATCTCAGCCGACAAGTCC | | TGGGACAGATTTCACTCTCACCATC |
| | | | ATCAGCACCGCCTACCTGCAGTGGA | | AGCAGCCTGCAGCCTGAAGATTTTG |
| | | | GCAGCCTGAAGGCCTCGGACACCGC | | CAACTTATTACTGTCAACAGTTTAA |
| | | | CATGTATTACTGTGCGAGAATGGTG | | TAATTTCGGCCCTGGGACCAAAGTG |
| | | | ACGTCCGGGACGTATTACTATGATA | | GATATCAAAC |
| | | | ATAGTGGTTATTCTTCGTCGGGCCC | | |
| | | | TTTTGACTACTGGGGCCAGGGAACC | | |
| | | | CTGGTCACCGTCTCCTCAG | | |
| | C1047 | 865 | GAGGTGCAGCTGGTGCAGTCTGGAG | 866 | GACATCCAGTTGACCCAGTCTCCAT |
| | | | CAGAGGTGAAAAAGCCCGGGGAGTC | | CCTCCCTGTCTGCATCTGTAGGAGA |
| | | | TCTGAAGATCTCCTGTAAGGGTTCT | | CAGAGTCACCATCACTTGCCGGGCA |
| | | | GGCTACAGCTTCATCAGTTACTGGA | | AGTCAGGGCATTAGCAGTGCTTTAG |
| | | | TTGTCTGGGTGCGCCAGATGCCCGG | | CCTGGTATCAACAGAAACCAGGGAA |
| | | | CAAAGGCCTGGAGTGGATTGGGATC | | AGCTCCTAAACTCCTGATCTATGAT |
| | | | ATCTATCCTGGTGACTCTGACACCA | | GCCTCCAGTTTGGAAAGTGGGGTCC |
| | | | TATACAGCCCGTCCTTCCAAGGCCA | | CATCAAGGTTCAGCGGCAGTGGATC |
| | | | GGTCACCCTCTCAGCCGACAAGTCC | | TGGGACAGATTTCACTCTCACCATC |
| | | | ATCAGCACCGCCTACCTGCAGTGGA | | AGCAGCCTGCAGCCTGAAGATTTTG |
| | | | GCAGCCTGAAGGCCTCGGACACCGC | | CAACTTATTACTGTCAACAGTCTGA |
| | | | CATCTATTACTGTGCGAAAATGGTG | | TAATTTCGGCCCTGGGACCAAAGTG |
| | | | ACGTCCGGGACCTCTTACTATGAAA | | GATATCAA |
| | | | CTAGAGGTTATGCTTCGTCGGGCCC | | |
| | | | CTTTGACAACTGGGGCCAGGGAACC | | |
| | | | CTGGTCACCGTCTCCTCAG | | |
| | C1048 | 867 | GAGGTGCAGCTGGTGCAGTCTGGAG | 868 | CAGTCTGTGCTGACTCAGCCACCCT |
| | | | CAGAGGTGAAAAAGCCCGGGGAGTC | | CAGCGTCTGGGACCCCCGGGCAGAG |
| | | | TCTGAAGATCTCCTGTAAGGTTTCT | | GGTCACCATCTCTTGTTCTGGAAGC |
| | | | GGATACAGCTTTATCAGCCACTGGA | | AGCTCCAACATCGGGAGTAATCCTG |
| | | | TCGGCTGGGTGCGCCAGATGCC | | TAAGCTGGTACCAGCAGCTCCCA |
| | | | CGGGAAAGGCCTGGAGTGGATGGGG | | GGACCGGCCCCCCAACTCCTCATCT |
| | | | ATCATCTATCCTGGTGACTCTGATA | | ATGGTAATGATCAGCGGCCCTCAGG |
| | | | CCAGATACAGCCCGTCCTTCCAAGG | | GGTCCCTGACCGATTCTCTGGCTCC |
| | | | CCAGGTCACCATCTCAGCCGACAAG | | AAGTCTGGCACCTCAGCCTCCCTGG |
| | | | TCCATCAGCACCGCCTACCTGCAGT | | CCATCAGTGGGCTCCAGTCTGAGGA |
| | | | GGAGCAGCCTGAAGGCCTCGGACAC | | TGAGGCTGATTATTACTGTGCAGCA |
| | | | CGCCATGTATTACTGTGCGAGACGT | | TGGGATGACAGCCTGAATGGTTATG |
| | | | GGGGCAAGTTGGGAGCTGGACTACT | | TCTTCGGAACTGGGACCAAGGTCAC |
| | | | GGGGCCAGGGAACCCTGGTCACCGT | | CGTCCTA |
| | | | CTC | | |
| | C1049 | 869 | GAGGTGCAGCTGGTGCAGTCTGGAG | 870 | CAGTCTGTGCTGACTCAGCCACCCT |
| | | | CAGAGGTGAAAAAGCCCGGGGAGTC | | CAGCGTCTGGGACCCCCGGGCAGAG |
| | | | TCTGAAGATCTCCTGTAAGAGCTCT | | GGTCACCATCTCTTGTTCTGGAAGC |
| | | | GGATACAGTTTTATCAGCCACTGGA | | AGCTCCAACATCGGCAGTAATACTG |
| | | | TCGGCTGGGTGCGCCAGATGCCCGG | | TAAACTGGTACCTGCAGCTCCCAGG |
| | | | GAAAGGCCTGGAGTGGATGGGGATC | | AACGGCCCCCAAACTCCTCATCTAT |
| | | | ATCTGGCCTGGTGACTCTGATACCA | | GGTAATGATCAGCGGCCCTCAGGGG |
| | | | GATACAGTCCGTCCTTCCAAGGCCA | | TCCCTGACCGATTCTCTGGCTCCAA |
| | | | GGTCACCATCTCAGTCGACAAGTCC | | GTCTGGCACCTCAGCCTCCCTGGCC |
| | | | ATCACCACCGTCTACCTGCAGTGGA | | ATCAGTGGGCTCCAGTCTGAGGATG |
| | | | GCAGCCTGAAGGCCGCGGACACCGC | | AGGCTGACTATTACTGTGCAGCATG |
| | | | CATGTATTACTGTGCGAGACGTGGG | | GGATGACAGGCTGAATGGTTATGTC |
| | | | TCAAGTTGGGAGGTGGACTACTGGG | | TTCGGAACTGGGACCACGGTCACCG |
| | | | GCCAGGGAACCCTGGTCACCGTCTC | | TCCTAG |
| | | | CTCAG | | |
| | C1050 | 871 | GAAGTGCAGCTGGTGGAGTCTGGGG | 872 | CAGTCTGCCCTGACTCAGCCTGCCT |
| | | | GAGGCTTGGTACAGCCTGGCAGGTC | | CCGTGTCTGGGTCTCCTGGACAGTC |
| | | | CCTGAGACTCTCCTGTGCAGCCTCT | | GATCACCATCTCCTGCACTGGAACC |
| | | | GGATTCACCTTTGATGATTATGGCA | | AGCAGTGATGTTGGGGGTTATAACC |
| | | | TGCACTGGGTCCGGCAAGCTCCAGG | | TTGTCTCCTGGTACCAACAGCACCC |
| | | | GAAGGGCCTGGAGTGGGTCTCAGGT | | AGGCAAAGCCCCCAAACTCATGATT |
| | | | ATTAGTTGGAATGGTGATAGCATAG | | TATGAGGGCAGTAAGCGGCCCTCAG |
| | | | GCTATGCGGACTCTGTGAAGGGCCG | | GGGTTTCTAATCGCTTCTCTGGCTC |
| | | | ATTCACCATCTCCAGAGACAACGCC | | CAAGTCTGGCAACACGGCCTCCCTG |
| | | | AAGACCTCCCTGTATCTGCAAATGA | | ACAATCTCTGGGCTCCAGGCTGAGG |
| | | | ACCGTCTGAGAGCTGAGGACACGGC | | ACGAGGCTGATTATTACTGCTGCTC |
| | | | CCTGTATTACTGTGCAAAAGCTGCG | | ATATGCATATAGTTTCACAAATGTC |
| | | | AGTAGAAGTACCAGAATAGGGGGTG | | TTCGGCACTGGGACCAAGGTCACCG |
| | | | CATTTGATATCTGGGGCCAAGGGAC | | TCCT |
| | | | AATGGTCACCGTCTCTTCAG | | |
| | C1051 | 873 | GAAGTGCAGCTGGTGGAGTCTGGGG | 874 | CAGTCTGCCCTGACTCAGCCTGCCT |
| | | | GAGGCTTGGTACAGCCTGGCAGGTC | | CCGTGTCTGGGTCTCCTGGACAGTC |
| | | | CCTGAGACTCTCCTGTGTAGCCTCT | | GATCACCATCTCCTGCACTGGAACC |
| | | | GGATTCACCTTTGATGATTATGGCT | | AGCAGTGATGTTGGGGGTTATAACC |
| | | | TACACTGGGTCCGGCAAGCTCCAGG | | TTGTCTCCTGGTACCAACAGTACCC |
| | | | GAAGGGCCTGGAGTGGGTCTCAGGC | | AGGCAAAGCCCCCAAACTCATGATT |
| | | | ATTAGTTGGAATAGTGATAGTATAG | | TATGAGGACAGTAAGCGGCCCTCAG |
| | | | GCTATGCGGACTCTGTGAAGGGCCG | | GGGTTTCTCATCGCTTCTCTGGCTC |
| | | | ATTCGCCATCTCCAGAGACAACGCC | | CAAGTCTGGCAACACGGCCTCCCTG |
| | | | AGGACCTCCCTGTATCTGCAAATGA | | ACAATCTCGGGGCTCCAGGCTGAGG |
| | | | ACCGTCTGAGAGCTGAGGACACGGC | | ACGAGGCTGATTATTACTGCTGCTC |
| | | | CTTGTATTACTGTGCAAAAGCTGCG | | ATATGCATTTAGTTTCACAAATGTC |
| | | | AGTAGAAGTACCAGAATAGGGGGTG | | TTCGGCACTGGGACCAAGGTCACCG |
| | | | CGTTTGATATCTGGGGCCAAGGGAC | | TCC |
| | | | AATGGTCACCGTCTCTTCAG | | |
| | C1052 | 875 | CAGGTCCAGCTGGTACAGTCTGGGG | 876 | GACATCCAGATGACCCAGTCTCCTT |
| | | | CTGAGGTGAAGAAGCCTGGGGCCTC | | CCACCCTGTCTGCATCTGTAGGAGA |
| | | | AGTGAAGGTCTCCTGCAAGGTTTCC | | CAGAGTCATTATCACTTGCCGGGCC |
| | | | GGATACACCCTCAGTGAATTATCCA | | AGTCAGAATATTCATAACTGGTTGG |
| | | | TGCACTGGGTGCGACAGGCTCCTGG | | CCTGGTATCAGCAGAAACCAGGGAA |
| | | | AGAAGGGCTTGAGTGGTTGGGAGGT | | AGCCCCTAAGCTCCTGATCTATAAG |
| | | | TTTGATCCTGAAGATGGTGAAACAA | | GCGTCTAGTTTAGAAAGTGGGGTCC |
| | | | TCAACGCACAGAAGTTCCAGGGCAG | | CATCAAGGTTCAGCGGCAGTGGATC |
| | | | AGTCACCATGACCGAGGACAGATCT | | TGGGACAGAATTCACTCTCACCATC |
| | | | ACAGACACAGCCTACATGGAGCTGA | | AGCAGCCTGCAGCCTGATGATTTTG |
| | | | GCAGCCTGAGATCTGAGGACACGGC | | CAACTTATTTCTGCCAACAGTATCA |
| | | | CGTGTATTACTGTGCAACGCGGGGT | | TAGTTATTCTTGGACGTTCGGCCAA |
| | | | CGATATTGTAGTAGTGGTAACTGCT | | GGGACCAAGGTGGAAATCAAAC |
| | | | ACTATCACCACTGGGGCCAGGGAAC | | |
| | | | CCTGGTCACCGTCTCCTCAG | | |
| | C1053 | 877 | GAGGTGCAGCTGTTGGAGTCTGGGG | 878 | GACATCCAGATGACCCAGTCTCCAT |
| | | | GAGGCTTGGTACAGCCTGGGGGGTC | | CCTCCCTGTCTGCATCTGTAGGAGA |
| | | | CCTGAGACTCTCCTGTGCAGCCTCT | | CAGAGTCACCATCACTTGCCGGGCA |
| | | | GGATTCACCTTTAGCAGCTATGCCA | | AGTCAGAGCATTAGCAGGTATTTAA |
| | | | TGAACTGGGTCCGCCAGGCTCCAGG | | ATTGGTATCAGCAGAAACCAGGGAA |
| | | | GAAGGGGCTGGAGTGGGTCTCAGCT | | AGCCCCTAAGCTCCTGATCTATGGT |
| | | | ATTAGTGGTAGTGGTGGTGGCACAT | | GCATCCAGTTTGCAAAGTGGGGTCC |
| | | | ACTACGCAGACTCCGTGAAGGGCCG | | CATCAAGGTTCAGTGGCAGTGGATC |
| | | | GTTCACCATCTCCAGAGACAATTCC | | TGGGACAGATTTCACTCTCACCATC |
| | | | AAGAACACGCTGTATCTGCAAATGG | | AGCAGTCTGCAACCTGAAGATTTTG |
| | | | ACAGCCTGAGAGCCGAGGACACGGC | | CAACTTACTGGTGTCAACAGAGTTA |
| | | | CGTATATTACTGTGCGAAAGATGTT | | CAGCACCCTTTCGATCACCTTCGGC |
| | | | CCGATTGAGCAGCAGCTGGTACCGA | | CAAGGGACACGACTGGAGATTAAAC |
| | | | CCTTTGACTACTGGGGCCAGGGAGC | | |
| | | | CCTGGTCACCGTCTCCTCAG | | |
| | C1054 | 879 | GAGGTGCAGCTGTTGGAGTCTGGGG | 880 | GACATCCAGATGACCCAGTCTCCAT |
| | | | GAGGCTTGGTACAGCCTGGGGGGTC | | CCTCCCTGTCTGCGTCTGTAGGAGA |
| | | | CCTGAGACTCTCCTGTGTAGTCTCT | | CAGAGTCACCATCACTTGCCGGGCA |
| | | | GGATTCACCTTTAGCAGCTATGCCA | | AGTCAGAGCATTAGCAGGTATTTAA |
| | | | TGAACTGGGTCCGCCAGGCTCCAGG | | ATTGGTATCAGCAGAAACCAGGGAA |
| | | | GAAGGGGCTGGAGTGGGTCTCAGTT | | AGCCCCTAAGCTCCTGATCTATGCT |
| | | | ATCGGTGGTAGTGGTGATGGGAGAT | | GCATCCAGTTTGCAAAGTGGGGTCC |
| | | | ACTACGCAGACTCCGTGAAGGGCCG | | CATCAAGGTTCAGTGGCAGTGGATC |
| | | | GTTCACCATCTCCAGAGACAATTCC | | TGGGACAGAATTCACTCTCACCATC |
| | | | AAGAACACGTTGTATCTGCAAATGA | | AGCAGTCTGCAACCTGAGGATTTTG |
| | | | ACAGCCTCAGAGGCGACGACACGGC | | CAACTTACTACTGTCAACAGAGTTA |
| | | | CGTATATTACTGTGCGAGAGATGTC | | CAGCACCCTTTCGATCACCTTCGGC |
| | | | CCCGTTGAGCAGCAGCTGGTACCGA | | CAAGGGACACGACTGGAGATTAAAC |
| | | | CCTTTGACTACTGGGGCCAGGGAAC | | |
| | | | CCTGGTCACCGTCTCCTCAG | | |
| | C1055 | 881 | CAGGTGCAGCTGGTGGAGTCTGGGG | 882 | GACATCCAGATGACCCAGTCTCCTT |
| | | | GAGGCGTGGTCCAGCCTGGGAGGTC | | CCACCCTGTCTGCATCTGTAGGAGA |
| | | | CCTGAGACTCTCCTGTGCAGCCTCT | | CAGAGTCACCATCACTTGCCGGGCC |
| | | | GGATTCACCTTCAGTACCTATGGCA | | AGTCAGAGTATTAGTAGCTGGTTGG |
| | | | TGAACTGGGTCCGCCAGGCTCCAGG | | CCTGGTATCAGCAGAAACCAGGGAA |
| | | | CAAGGGGCTGGAGTGGGTGGCACTT | | AGCCCCTAAGCTCCTGATCTATAAG |
| | | | ATATTATATGATGGAAGTGATAAAT | | GCGTCTAGTATAGAAAGTGGGGTCC |
| | | | ACTATGCAGACTCCGTGAAGAGCCG | | CACCAAGGTTCAGCGGCAGTGGATC |
| | | | ATTCA | | TGGGAC |
| | | | CCATCTCCAGAGACAATTCCAGGAA | | AGAGTTCACTCTCACCATCAGCAGC |
| | | | CACGCTGTATCTGCAAATGACTAGC | | CTGCAGCCTGATGATTTTGCAACTT |
| | | | CTGAGAGCTGAGGACACGGCTGTGT | | ATTACTGCCAACAGTATAATAGTTA |
| | | | ATTACTGTGCGAAAGCTTTATCATC | | TTCGTACACTTTTGGCCAGGGGACC |
| | | | CACGTATTACTATGATGCTAGTGGT | | AAGCTGGAGATCAAAC |
| | | | CCCGATGCTTTTGATATCTGGGGCC | | |
| | | | AAGGGACAATGGTCACCGTCTCTTC | | |
| | | | AG | | |
| | C1056 | 883 | CAGGTGCAGCTGGTGGAGTCTGGGG | 884 | GACATCCAGATGACCCAGTCTCCTT |
| | | | GAGGCGTGGTCCAGCCTGGGAGGTC | | CCACCCTGTCTGCATCTGTGGGAGA |
| | | | CCTGAGACTCTCCTGTGCAGCCTCT | | CAGAGTCACCATCACTTGCCGGGCC |
| | | | GGATTCACCTTCAGTACCTATGGCA | | AGTCAGAGTATTAGTACCTGGTTGG |
| | | | TGAACTGGGTCCGCCAGGCTCCAGG | | CCTGGTATCAGCAGAAACCAGGGAA |
| | | | CAAGGGGCTGGAGTGGGTGGCACTT | | AGCCCCTCAACTCCTGATCTACAAG |
| | | | ATATTATTTGATGGAAGTGATAAAT | | GCGTCTAGTATAGAAAGTGGGGTCC |
| | | | ACTATGCGGACTCCGTGAAGAGCCG | | CACCAAGGTTCAGCGGCAGTGGATC |
| | | | ATTCACCATCTCCAGAGACAATTCC | | TGGGACAGAGTTCACTCTCACCATC |
| | | | AGGAACACACTGTATCTGCAAATGA | | AGCAGCCTGCAGCCTGATGATTTTG |
| | | | CCAGCCTGAGAGCTGAGGACACGGC | | CAACTTATTACTGCCAACAGTATAA |
| | | | TGTGTATTACTGTGCGAAAGCTTTA | | TAGTTATTCGTACACTTTTGGCCAG |
| | | | TCATCCACGTTTTACTTTGATGCTA | | GGGACCAAGCTGGAGATCAAAC |
| | | | GTGGTCCCGATGCCTTTGATATCTG | | |
| | | | GGGCCAAGGGACAATGGTCACCGTC | | |
| | | | TCTTCAG | | |
| | C1057 | 885 | CAGGTGCAGCTGGTGCAGTCTGGGG | 886 | CAGTCTGCCCTGACTCAGCCTCGCT |
| | | | CTGAGGTGAAGAAGCCTGGGTCCTC | | CAGTGTCCGGGTCTCCTGGACAGTC |
| | | | GGTGAAGGTCTCCTGCAAGGCTTCT | | AGTCACCATCACCTGCACTGGAACC |
| | | | GGAGGCACCTTCACTACCTATATTA | | AGCAGTAATGTAGGTGGTTATAAGT |
| | | | TAAGCTGGGTGCGACAGGCCCCTGG | | ATGTGTCCTGGTTCCAACAACACCC |
| | | | ACAAGGGCTTGAGTGGATGGGAGGG | | AGGCAAAGCCCCCAAATTTCTGATT |
| | | | ATCAGCCCTATGCTTGGTACAGCAA | | TATGATGTCAGTGAGCGGTCCTCAG |
| | | | ACTACGCACAGAAGTTCCAGGGCGG | | GGGTCCCTGATCGCTTCTCTGGCTC |
| | | | AGTCACGATTACCGCGGACGAATCC | | TAAGTCTGGCAACACGGCCTCCCTG |
| | | | ACGACCACAGCCTACATGGAGATGA | | ACCATCTCTGGGCTCCAGGCTGAGG |
| | | | GCGGCCTGAGATCTGAGGACACGGC | | ATGAGGCTGATTATTACTGCTGCTC |
| | | | CGTGTATTATTGTGCGAGAGCCCAT | | ATATGCAGGCAAGTACACCGTAGTC |
| | | | ATGTATTGCAGTGATGGTAGCTGCT | | TTCGGCGGAGGGACCAGACTGACCG |
| | | | ACAGACAGAGTGGCTACTTTGACTC | | TC |
| | | | CTGGGGCCAGGGAACCCTGGTCACC | | |
| | | | GTCTCCTCAG | | |
| | C1058 | 887 | GAGGTGCAGCTGGTGGAGTCTGGGG | 888 | GACATCCAGTTGACCCAGTCTCCAT |
| | | | GAGGCTTGGTCCAGCCTGGGGGGTC | | CCTTCCTGTCTGCATCTGTAGGAGA |
| | | | CCTGAGACTCTCCTGTGCAGCCTCT | | CAGAGTCACCATCACTTGCCGGGCC |
| | | | GGAATCATCGTCAGTAGTAACTACA | | AGTCAGGGCATTAGCAGTTATTTAG |
| | | | TGAATTGGGTCCGCCAGGTTCCAGG | | CCTGGTATCAGCAAAAACCAGGGAA |
| | | | GAAGGGGCTGGAGTGGGTCTCAGTT | | AGCCCCTAACCTCCTGATCTATGCT |
| | | | CTTTATAGCGGTGGTAGCACATTCT | | GCATCCACTTTGCAAAGTGGGGTCC |
| | | | ACGCAGACTCCGTGAGGGGCCGATT | | CATCAAGGTTCAGCGGCAGTGGATC |
| | | | CACCATCTCCAGAGACAATTCCAAG | | TGGGACAGATTTCACTCTCACAATC |
| | | | AACACGCTGTTTCTTCAAATGAACA | | AGCAGCCTGCAGCCTGAAGATTTTG |
| | | | GCCTGAGACCTGAGGACACGGCTGT | | CAACTTATTACTGTCAACAGCTTAA |
| | | | GTATTACTGTGCGAGAGATTTCCGA | | TAGTTATTCCCCCCTTTTCGGCCAA |
| | | | GAAGGTGCTTTTGATATCTGGGGCC | | GGGACACGACTGGAGATTAAAC |
| | | | AAGGGACAATGGTCACCGTCTC | | |
| | C1059 | 889 | GAGGTGCAGCTGGTGGAGTCGGGGG | 890 | GACATCCAGTTGACCCAGTCTCCAT |
| | | | GAGGCTTGGTCCAGCCGGGGGGGTC | | CCTTCCTGTCTGCATCTGTAGAAGA |
| | | | CCTAAGACTCTCCTGTGCAGCCTCT | | CAGAGTCACCATCACTTGCCGGGCC |
| | | | GGAGTCACCGTCAGTTACAACTACA | | AGTCAGGGCATTAGCAGTTATTTAG |
| | | | TGCACTGGGTCCGCCAGGCTCCAGG | | CCTGGTATCAGCAAAAACCAGGGAA |
| | | | GAAGGGGCTGGAGTGGGTCTCAGTT | | AGCCCCTAAGCTCCTGATCTATGGT |
| | | | TTTTTTCCCGGTGGTAGTATATTCT | | GCATCCACTTTGCAAAGTGGGGTCC |
| | | | ACGCAGACTCCGTGAAGGGCCGATT | | CATCAAGGTTCAGCGGCAGTGGATC |
| | | | CAGCATCTCCAGAGACAATTCTCAC | | TGGGACGGAGTTCACTCTCACAATC |
| | | | AACACGCTTTATCTTCAAATGAACA | | AGCAGCCTGCAGCCTGAAGATTCTG |
| | | | ACTTGAGACCTGAGGACACGGCTGT | | CAACTTATTACTGTCAACAGCTTAA |
| | | | CTATTACTGTGCGAGAGATTTTCGA | | TAGTTACCCCCCCCTTTTCGGCCAA |
| | | | GAAGGGGCTATTGATCTCTGGGGCC | | GGGACACGACTGGAGATTAAAC |
| | | | AAGGGACAATGGTCACCGTCTCTTC | | |
| | | | AG | | |
| | C1060 | 891 | GAGGTGCAGCTGGTGGAGTCTGGGG | 892 | GACATCCAGATGACCCAGTCTCCAT |
| | | | GAGACTTGGTCCAGCCGGGGGGGTC | | CTTCCGTGTCTGCATCTGTAGGAGA |
| | | | CCTGAGACTCTCCTGTGCAGCCTCT | | CAGAGTCACCATCACTTGTCGGACA |
| | | | GAAATCATCGTCAGTAGAAATTACA | | AGTCAGAGTATTAGCACCTCGTTAG |
| | | | TGAACTGGGTCCGCCAGGCTCCAGG | | CCTGGTATCAGCAGAAACCAGGGAA |
| | | | GAAGGGGCTGGAGTGGGTCTCAATT | | AGCTCCTAAGCTCCTGATCTATGCT |
| | | | ATTTATAGCGGCGGGAGTACGTTCT | | GCATCCAGTTTGCAGCGTGGGGTCC |
| | | | ACGGAGACTCCGTGAAGGGCCGATT | | CATCTAGGTTCAGCGGCACTGGATC |
| | | | CACCATCTCCAGAGACAGTTCCAAG | | TGGGACAGATTTCACTCTCACCATC |
| | | | AACACGCTGTATCTTCAAATGCATG | | AGCAGCCTGCAGCCTGAAGATTTTG |
| | | | GCCTGAGAGTTGAGGACACGGCTAT | | CAACTTACTACTGTCAACAGTCTAG |
| | | | ATATTACTGTGCGAGGTCGTACGGT | | CAGTTCCCCTCCCCTATTCACTTTC |
| | | | GACTACTATATTGACTACTGGGGCC | | GGCCCTGGGACCAAAGTGGATATCA |
| | | | AGGGAACCCTGGTCACCGTCTCCTC | | AAC |
| | | | AG | | |
| | C1061 | 893 | GAGGTGCAGCTGGTGGAGTCTGGGG | 894 | GACATCCAGATGACCCAGTCTCCAT |
| | | | GAGGCTTGGTACAGCCTGGGGGGTC | | CCTCCCTGTCTGCATCTGTAGGAGA |
| | | | CCTGAGACTCTCCTGTGCAGCCTCT | | CAGAGTCACCATCACTTGCCGGGCA |
| | | | GGATTCACCTTCAGTAGGTACGACA | | AGTCAGAGCATTAGCAGGTATTTAA |
| | | | TGCACTGGGTCCGCCAAGGTACAGG | | ACTGGTATCAGCAGAAACCAGGGAA |
| | | | AAAAGGTCTGGAGTGGGTCTCAGCT | | AGCCCCTAAGCTCCTGATCTATGCT |
| | | | ATTGGTACTTCTGGTGACACATACT | | GCATCCAGTTTGCAAAGTGGGGTCC |
| | | | ATCCAGACTCCGTGAAGGGCCGATT | | CATCAAGGTTCAGTGGCAGCGGAGC |
| | | | CACCATCTCCAGAGAAAATGCCAAG | | TGGGACAGATTTCACTCTCACCATC |
| | | | AACTCCTTGTATCTTCAAATGAACA | | AGCAGTCTGCAACCTGAAGATTTTG |
| | | | GCCTGAGAGCCGGGGACACGGCTGT | | CAATTTACTACTGTCAACAGAGTTA |
| | | | GTATTACTGTGCAAGAGGGGGTCTC | | CAGTAACCCTCCGATCACCTTCGGC |
| | | | CAAACTACGACTTGGCTTTTTGACT | | CAAGGGACACGACTGGAGATTAAAC |
| | | | ACTGGGGCCAGGGAACCCTGGTCAC | | |
| | | | CGTCTCCTCAG | | |
| | C1062 | 895 | GAGGTGCAGCTGGTGGAGTCTGGGG | 896 | GACATCCAGATGACCCAGTCTCCAT |
| | | | GAGGCTTGGTACAGCCTGGGGGGTC | | CCTCCCTGTCTGCATCTGTAGGAGA |
| | | | CCTGAGACTCTCCTGTGCAGCCTCT | | CAGAGTCACCATCACTTGCCGGGCA |
| | | | GGATTCACCTTCAGTAACTACGACA | | AGTCAGACCATTAGCAGGTATTTAA |
| | | | TGCACTGGGTCCGCCAAACTACAGG | | ATTGGTATCAACAGAAACCAGGGAA |
| | | | AAAAGGTCTGGAGTGGGTCTCAGCT | | AGCCCCTAAGCTCCTGATCTATGCT |
| | | | ATTGGTACTGCTGGTGACACATACT | | GCATCCAGTCTCCAAAGTGGGGTCC |
| | | | ATCCAGGCTCCGTGAAGGGCCGATT | | CATCAAGGTTCAGTGGCAGTGGATC |
| | | | CACCATGTCCAGAGAAAATGCCAAG | | TGGGACAGATTTCACTCTCACCATC |
| | | | AACTCCTTGTATCTTCAAATGAACA | | AGCAGTCTGCAACCTGAAGATTTTG |
| | | | GCCTGAGAGCCGGGGACACGGCTGT | | CAACTTACTACTGTCAACAGAGTTA |
| | | | GTATTACTGTGC | | CACTATGCCTCCGATCACCTTCGGC |
| | | | AAGAGGGGGTCTCCAAACTACGACT | | CAAGGGACACGACTGGAGATTAAAC |
| | | | TGGCTTTTTGACAACTGGGGCCAGG | | |
| | | | GAACCCTGGTCACCGTCTCCTCAG | | |
| | C1063 | 897 | GAGGTGCAGCTGGTGCAGTCTGGAG | 898 | AATTTTATGCTGACTCAGCCCCACT |
| | | | CAGAGGTGAAAAAGCCCGGGGAGTC | | CTGTGTCGGAGTCTCCGGGGAAGAC |
| | | | TCTGAAGATCTCCTGTAAGGGCTAT | | GGTAACCATCTCCTGCACCCGCAGC |
| | | | GGAAACAGCTTTAACAACTACTGGA | | AGTGACAGCATTGGCAGCAACTATG |
| | | | TCGCCTGGGTGCGCCAGATGCCCGT | | TACAGTGGTACCAGCAACGCCCGGG |
| | | | GAAAGGCCTGGAGTGGATGGGGGTC | | CAGTTCCCCCACCATTGTGATCTAT |
| | | | ATCAATCCTGGTGACTCTGATACCA | | GAGGATAGCCAAAGACCCTCTGGGG |
| | | | GATACAGCCCGTCCTTCCAAGGCCA | | TCCCTCATCGGTTCTCTGGCTCCTT |
| | | | GGTCACCATATCAGTCGACAAGTCC | | CGACAGCTCCTCCAACTCTGCCTCC |
| | | | ATCAGTACCGCCTACCTGCAGTGGA | | CTCACCATCTCTGGACTGAAGACTG |
| | | | GCAGCCTGAAGGCCTCGGACACCGC | | AGGACGAGGCTGACTACTACTGTCA |
| | | | CATGTATTACTGTGCGAGAACATGG | | GTCTTGGGATAGCGGCAATCTGGTA |
| | | | TCACCAGCTGCTGTGGCGTTCTTTG | | TTCGGCGGAGGGACCAAGCTGACCG |
| | | | ACTCTTGGGGCCAGGGAACCCTGGT | | TCCTAG |
| | | | CACCGTCTCCT | | |
| | C1065 | 899 | GAGGTGCAGCTGGTGGAGTCTGGAG | 900 | CAGTCTGCCCTGACTCAGCCTGCCT |
| | | | GAGGCTTGATCCAGCCTGGGGGGTC | | CCGTGTCTGGGTCTCCTGGACAGTC |
| | | | CCTGAGACTCTCCTGTGCAGCCTCT | | GATCACCATCTCCTGCACTGGAACC |
| | | | GGATTCACCGTCAGTCGCAACTACA | | AGCAGTGACATTGGTGGTTATCACT |
| | | | TGAGCTGGGTCCGCCAGGCTCCAGG | | ATGTCTCCTGGTACCAACAGCACCC |
| | | | GAAGGGGCTGGAGTGGGTCTCAGTT | | AGGCAAAGCCCCCAAACTCATGATT |
| | | | ATTTATAGCGGTGGTAGCACATTCT | | TATGATGTCAGTAATCGGCCCTCAG |
| | | | ACGCAGACTCCGTGAAGGGCCGATT | | GGATTTCTAATCGCTTCTCTGGCTC |
| | | | CACCATCTCCAGAGACAATTCCAAG | | CAAGTCTGGCAACACGGCCTCCCTG |
| | | | AACACGCTGTATCTTCAAATGAACA | | ACCATCTCTGGGCTCCAGGCTGAGG |
| | | | GCCTGAGAGCCGAGGACACGGCCGT | | ACGAGGCTGATTATTACTGCAGCTC |
| | | | GTATTACTGTGCGAGAGGCCTCCCG | | ATATGCAAGCAGCAGCGTGATATTC |
| | | | ACTGGGGAAGGTTGGAACTACTTTG | | GGCGGAGGGACCAAGCTGACCGTCC |
| | | | ACTACTGGGGCCAGGGAACCCTGGT | | TAG |
| | | | CACCGTCTCCTCAG | | |
| | C1066 | 901 | GAAGTGCAGCTGGTGGAGTCTGGGG | 902 | CAGCTTGTGCTGACTCAATCATCCT |
| | | | GGGGCTTGGTACAGCCTGGCAGGTC | | CTGCCTCTGCTTCCCTGGGATCCTC |
| | | | CCTGAGACTCTCCTGTGCAGCCTCT | | GGTCAAGCTCACCTGCACTCTGAAC |
| | | | GGATTCATGTTTGATGATTATGCCA | | AGTGGGCACAGTAGCTACATCATCG |
| | | | TGCACTGGGTCCGGCAAGCTCCAGG | | CATGGCATCAGCAGCAGCCAGGGAA |
| | | | GAAGGGCCTGGAGTGGGTCTCAGGT | | GGCCCCTCGGTACTTGATGAAGCTT |
| | | | ATTAATTGGAGTAGTGCTGACATTG | | GAAGGTAGTGGAAGCTACAACAAGG |
| | | | GCTATGTGGACTCTGTGAAGGGCCG | | GGAGCGGAGTTCCTGATCGCTTCTC |
| | | | ATTCACCATCTCCAGAGACAACGCC | | AGGCTCCAGCTCTGGGGCTGACCGC |
| | | | AAGAACTCCCTGTATCTGCAAATGA | | TACCTCACCATCTCCAACCTCCAGT |
| | | | ACAGTCTGAGAACTGAGGACACGGC | | TTGAGGATGAGGCTGATTATTACTG |
| | | | CTTCTATTACTGTGCAAAAGGGTGG | | TGCGACCTGGGACAGTAACACTCAG |
| | | | TTCGGAGAATTATTGGGCGGAAGTG | | GTATTCGGCGGAGGGACCAAGCTGA |
| | | | ACTCCTGGGGCCAGGGAACCCTGGT | | CCGTCCTAG |
| | | | CACCGTCTCCTCAG | | |
| | C1067 | 903 | CAGGTGCAGCTGGTGCAGTCTGGGG | 904 | GAAATTGTGTTGACGCAGTCTCCAG |
| | | | CTGAGGTGAAGAAGCCTGGGGCCTC | | GCACCCTGTCTTTGTCTCCAGGGGA |
| | | | AGTGAAGGTTTCCTGCAAGGCATCT | | AAGAGCCACCCTCTCCTGTAGGGCC |
| | | | AGAGACACCTTCACCACCCACTATA | | AGTCAGAGTGTTAGCAGCAGCTACT |
| | | | TACACTGGGTGCGACAGGCCCCTGG | | TAGCCTGGTACCAGCAGAAACCTGG |
| | | | ACAAGGGCTTGAGTGGATGGGAATA | | CCAGGCTCCCAGGCTCCTCATCTAT |
| | | | ATCAACCCTAGTGGTGGTAGCATAA | | GGTGCATCCAGCAGGGCCACTGGCA |
| | | | GCTACGCACAGAAGTTCCAGGGCAG | | TCCCAGACAGGTTCACTGGCAGTGG |
| | | | AGTCACCATGACCAGGGACACGTCC | | GTCTGGGACAGACTTCACTCTCACC |
| | | | ACGAGCACAGTCTACATGGA | | ATCAGCAGACTGGAGCCTGA |
| | | | GCTGAGCAGCCTGCGATCTGAGGAC | | AGATTTTGCAGTGTATTACTGTCAG |
| | | | ACGGCCGTCTATTACTGTGCGAGAG | | CAATATGGTCGCTCCTCGGGATTCA |
| | | | GGGGGATAGTACCACATCTGAGTAA | | CTTTCGGCCCTGGGACCAAAGTGGA |
| | | | CTGGTTCGACCCCTGGGGCCAGGGA | | TATCAAAC |
| | | | ACCCTGGTCACCGTCTCCTCAG | | |
| | C1068 | 905 | CAGGTGCAGCTGGTGGAGTCTGGGG | 906 | GACATCGTGATGACCCAGTCTCCAG |
| | | | GAGGCGTGGTCCAGCCTGGGAGGTC | | ACTCCCTGGCTGTGTCTCTCGGCGA |
| | | | CCTGAGACTCTCCTGTGCAGCCTCT | | GAGGGCCACCATCAACTGCAAGTCC |
| | | | GGATTCACCTTCAGTACCTTTGCTA | | AGCCAGAGTGTTTTATTCAGCTCCA |
| | | | TGCACTGGGTCCGCCAGGCTCCAGG | | CCAATAAGAACTACTTAGCTTGGTA |
| | | | CAAGGGGCTAGAGTGGGTGGCAGTT | | CCAGCAGAAACCAGGACAGCCTCCT |
| | | | ACATCATATGATGGAAGTAATAAAT | | AAGCTGCTCATTTACTGGGCAGCTA |
| | | | ACTACGCAGACTCCGTGAAGGGCCG | | CCCGGGAATCCGGGGTCCCTGACCG |
| | | | ATTCACCATCTCCAGAGACAATTCC | | ATTCAGTGGCAGCGGGTCTGGGACA |
| | | | AAGAACACGCTGTATCTGCAAATGA | | GACTTCACACTCACCATCAGCAGCC |
| | | | ACAGCCTGAGAGCTGAGGACACGGC | | TGCAGGCTGAAGATGTGGCAGTTTA |
| | | | TGTGTATTACTGTGCGAGAGGCCTA | | TCACTGTCAGCAATACTATAGTACC |
| | | | CTATGGTTCGGGGAGTCTGAATACT | | CCTTTCACTTTCGGCCCTGGGACCA |
| | | | TCCAGCACTGGGGCCAGGGCACCCT | | AAGTGGATATCAAAC |
| | | | GGTCACCGTCTCCTCAG | | |
| | C1069 | 907 | CAGGTGCAGCTGGTGGAGTCTGGGG | 908 | GACATCCAGATGACCCAGTCTCCAT |
| | | | GAGGCGTGGTCCAGCCTGGGAGGTC | | CCTCCCTGTCTGCTTCTGTAGGAGA |
| | | | CCTGAGACTCTCCTGTGCAGCCTCT | | CAGAGTCACCATCACTTGCCGGGCA |
| | | | GGATTCACCTTCAGTAGCTATTCTA | | AGTCAGAGCATTAGTAGGTATTTAA |
| | | | TCCACTGGGTCCGCCAGGCTCCAGG | | ATTGGTATCAGCAGAAACCAGGGAA |
| | | | CAAGGGGCTTGAGTGGGTGGCAGTT | | AGCCCCTAAGCTCCTGATCTATGAT |
| | | | ATATCAGATGATGCAAGTATGAAAT | | GCATCCAGTTTCCAAAGTGGGGTCC |
| | | | TCTACGCAGACTCCGTGAAGGGCCG | | CATCAAGGTTCAGTGGCAGTGGATC |
| | | | ATTCACCATCTCCAGAGACAATTCC | | TGGGACAGATTTCACTCTCACCATC |
| | | | AAGAACACACTGTTTCTGCAGATGA | | AGCAGTCTGCAGCCTGAAGATTTTG |
| | | | ACAGCCTGAGTCCTGAGGACACGGC | | CAACTTACTACTGTCAACAGAGTTA |
| | | | TGTATATTACTGTGCGAGAGATGCG | | CAGTACCCCTTCGGTCACTTTCGGC |
| | | | CTGACTGCAATATCGGTTCGTTTTG | | GGAGGGACCAAGGTGGAGATCAAAC |
| | | | ACTACTGGGGCCAGGGAACCCTGGT | | |
| | | | CACCGTCTCCTCAG | | |

| Participant | Antibody | Time- | | EC50 | | |
|---|---|---|---|---|---|---|
| ID | ID | point | Clone | [ng/ml] | Neutralization [ng/ml] | |
| COV21 | C837 | 12m | | 2.03 | 8.61 | 48.75 |
| | C838 | 12m | Singlet | 3.03 | 2.90 | 25.59 |
| | C839 | 12m | clone | 4.38 | >1000 | >1000 |
| | C840 | 12m | clone | 1.36 | >1000 | >1000 |
| | C841 | 12m | Singlet | 3.15 | >1000 | >1000 |
| | C842 | 12m | Singlet | 3.01 | 8.44 | 45.08 |
| | C843 | 12m | Singlet | 1.34 | >1000 | >1000 |
| | C844 | 12m | Singlet | 1.28 | 972.33 | >1000 |
| | C845 | 12m | Singlet | 1.39 | 494.25 | >1000 |
| | C846 | 12m | Singlet | 3.48 | 423.80 | >1000 |
| | C847 | 12m | Singlet | 3.06 | 411.22 | >1000 |
| | C848 | 12m | clone | 2.23 | >1000 | >1000 |
| | C849 | 12m | Singlet | 3.64 | >1000 | >1000 |
| | C850 | 12m | Singlet | 3.70 | 61.93 | 436.21 |
| | C851 | 12m | clone | 2.83 | 12.93 | 33.10 |
| | C852 | 12m | clone | 4.59 | 470.20 | >1000 |
| | C853 | 12m | Singlet | 2.30 | 11.43 | 30.37 |
| | C854 | 12m | Singlet | 2.57 | 19.73 | 107.13 |
| | C855 | 6.2m | clone | 2.73 | 20.28 | 41.64 |
| | C856 | 1.3m | Singlet | 2.65 | >1000 | >1000 |
| | C857 | 1.3m | Singlet | 2.01 | >1000 | >1000 |
| | C858 | 1.3m | Singlet | 3.27 | >1000 | >1000 |
| | C859 | 6.2m | Singlet | 2.75 | >1000 | >1000 |
| | C860 | 1.3m | Singlet | 2.61 | >1000 | >1000 |
| | C861 | 1.3m | Singlet | 3.61 | 489.37 | >1000 |
| | C862 | 12m | Singlet | 2.14 | >1000 | >1000 |
| | C863 | 12m | singlet | 3.31 | 167.32 | >1000 |
| | C864 | 12m | singlet | 1.89 | 12.14 | 31.89 |
| | C865 | 12m | singlet | 2.14 | >1000 | >1000 |
| | C866 | 12m | singlet | 2.00 | >1000 | >1000 |
| | C867 | 12m | singlet | 2.71 | 13.47 | 37.26 |
| | C868 | 12m | singlet | 3.39 | 61.26 | 238.40 |
| | C869 | 12m | singlet | 3.14 | 145.34 | >1000 |
| | C870 | 12m | singlet | 2.17 | >1000 | >1000 |
| | C950 | 12m | singlet | 2.15 | 8.40 | 51.19 |
| COV47 | C871 | 12m | singlet | 1.52 | 13.15 | 32.24 |
| | C872 | 12m | clone | 2.19 | 11.18 | 56.82 |
| | C873 | 12m | clone | 4.05 | 5.29 | 74.64 |
| | C874 | 12m | singlet | 5.20 | 436.83 | >1000 |
| | C875 | 12m | singlet | 3.50 | 8.09 | 49.42 |
| | C876 | 12m | clone | 3.53 | 7.44 | 38.03 |
| | C877 | 12m | clone | 2.53 | 15.71 | 48.06 |
| | C878 | 12m | singlet | 2.88 | >1000 | >1000 |
| | C879 | 12m | clone | 4.25 | 181.34 | >1000 |
| | C880 | 12m | singlet | 2.20 | 23.83 | 332.32 |
| | C881 | 12m | singlet | 1.44 | 9.85 | 57.41 |
| | C882 | 12m | clone | 2.90 | >1000 | >1000 |
| | C884 | 6.2m | singlet | 4.22 | 37.14 | >1000 |
| | C885 | 1.3m | singlet | 7.45 | >1000 | >1000 |
| | C886 | 12m | singlet | 2.48 | 78.28 | >1000 |
| | C887 | 6.2m | singlet | 2.53 | 2.07 | 11.04 |
| | C888 | 1.3m | singlet | 1.44 | 85.84 | 469.41 |
| | C889 | 12m | singlet | 4.25 | 6.07 | 70.12 |
| | C890 | 12m | singlet | 2.20 | 2.92 | 41.61 |
| | C891 | 1.3m | singlet | 1.44 | >1000 | >1000 |
| | C892 | 12m | singlet | 2.90 | 62.71 | >1000 |
| | C893 | 12m | singlet | 3.73 | 115.91 | >1000 |
| | C894 | 12m | singlet | 16.77 | 97.11 | 266.28 |
| | C895 | 12m | singlet | 2.21 | >1000 | >1000 |
| | C896 | 12m | singlet | 4.30 | >1000 | >1000 |
| | C897 | 12m | singlet | 1.88 | >1000 | >1000 |
| | C898 | 12m | singlet | 7.60 | >1000 | >1000 |
| | C899 | 12m | singlet | 2.23 | 7.93 | 42.90 |
| | C900 | 12m | singlet | 2.54 | 13.62 | 70.01 |
| | C901 | 12m | singlet | 2.16 | 358.70 | >1000 |
| | C902 | 12m | singlet | 3.4 | 8.77 | 49.52 |
| COV57 | C952 | 12m | singlet | 2.4 | 7.66 | 32.20 |
| | C953 | 1.3m | clone | 4.09 | >1000 | >1000 |
| | C954 | 12m | clone | 1.48 | 10.93 | 33.05 |
| | C955 | 12m | singlet | 2.44 | 2.76 | 35.27 |
| | C956 | 6.2m | clone | 1.58 | 17.76 | 67.57 |
| | C957 | 12m | singlet | 1.93 | 16.44 | 60.03 |
| | C958 | 12m | clone | 4.02 | 379.01 | >1000 |
| | C959 | 12m | clone | 4.58 | 10.15 | 51.74 |
| | C960 | 12m | singlet | 1.62 | 127.01 | >1000 |
| | C961 | 6.2m | singlet | 2.57 | 19.22 | 59.56 |
| | C962 | 12m | singlet | 1.74 | 12.93 | 87.60 |
| | C963 | 12m | clone | 2.96 | 78.09 | >1000 |
| | C964 | 12m | clone | 2.79 | >1000 | >1000 |
| | C965 | 12m | clone | 1.69 | 2.63 | 18.57 |
| | C966 | 12m | clone | 1.97 | >1000 | >1000 |
| | C967 | 6.2m | clone | 3.58 | 14.64 | 33.53 |
| | C968 | 12m | singlet | 3.19 | 5.73 | 63.15 |
| | C969 | 1.3m | singlet | 3.49 | 585.28 | >1000 |
| | C970 | 12m | singlet | 3.71 | 3.64 | 16.35 |
| | C971 | 12m | clone | 2.21 | 90.43 | >1000 |
| | C972 | 12m | clone | 2.18 | 11.52 | 46.20 |
| | C973 | 12m | clone | 2.87 | 5.71 | 41.11 |
| | C974 | 6.2m | clone | 2.94 | >1000 | >1000 |
| | C975 | 12m | singlet | 2.88 | >1000 | >1000 |
| | C976 | 12m | singlet | 2.52 | >1000 | >1000 |
| | C977 | 12m | clone | 2.13 | >1000 | >1000 |
| | C978 | 12m | singlet | 2.09 | 121.85 | >1000 |
| | C979 | 12m | clone | 2.54 | >1000 | >1000 |
| | C980 | 12m | singlet | 4.07 | 3.80 | 36.05 |
| | C981 | 12m | singlet | 2.12 | 459.46 | >1000 |
| | C982 | 12m | singlet | 2.56 | >1000 | >1000 |
| | C983 | 12m | singlet | 2.11 | >1000 | >1000 |
| | C984 | 12m | singlet | 2.76 | 2.64 | 17.31 |
| | C985 | 12m | singlet | 3.67 | 6.79 | 31.38 |
| | C986 | 12m | singlet | 3.36 | 25.95 | 218.32 |
| | C987 | 12m | clone | 3.11 | 9.16 | 50.96 |
| | C989 | 12m | clone | n.d. | 41.45 | 786.13 |
| | C990 | 12m | clone | 1.85 | 2.87 | 34.80 |
| | C991 | 6.2m | singlet | 3.46 | 50.21 | >1000 |
| | C992 | 12m | singlet | 3.24 | 33.65 | 511.76 |
| | C993 | 12m | clone | 2.29 | 8.94 | 43.82 |
| | C994 | 12m | clone | 2.09 | 86.71 | >1000 |
| | C995 | 12m | singlet | 3.79 | 5.99 | 37.61 |
| | C996 | 12m | singlet | 3.07 | 38.98 | 338.75 |
| COV72 | C997 | 12m | clone | 3.49 | 7.42 | 96.40 |
| | C998 | 6.2m | singlet | 2.51 | >1000 | >1000 |
| | C999 | 12m | singlet | 2.68 | >1000 | >1000 |
| | C1000 | 6.2m | clone | 3.20 | >1000 | >1000 |
| | C1001 | 12m | singlet | 3.23 | >1000 | >1000 |
| | C1002 | 12m | clone | 0.83 | 22.51 | 72.62 |
| | C1003 | 12m | singlet | 1.82 | 2.40 | 19.43 |
| | C1004 | 6.2m | singlet | n.d. | 3.90 | 45.95 |
| | C1006 | 6.2m | singlet | 2.04 | 42.01 | 418.90 |
| | C1007 | 12m | singlet | 3.22 | 52.22 | 225.87 |
| | C1008 | 1.3m | singlet | 17.23 | 697.10 | >1000 |
| | C1009 | 12m | singlet | 1.34 | 5.23 | 34.85 |
| | C1010 | 1.3m | singlet | 2.45 | >1000 | >1000 |
| | C1011 | 12m | singlet | 1.49 | >1000 | >1000 |
| | C1012 | 1.3m | singlet | 3.29 | 410.41 | >1000 |
| | C1013 | 12m | singlet | 8.92 | 65.35 | 193.34 |
| | C1014 | 12m | singlet | 2.95 | >1000 | >1000 |
| | C1015 | 12m | singlet | >1000 | >1000 | >1000 |
| | C1016 | 12m | singlet | 2.16 | 30.39 | 111.92 |
| | C1018 | 12m | singlet | 3.09 | >1000 | >1000 |
| | C1019 | 12m | singlet | 2.80 | 30.25 | >1000 |
| | C1020 | 12m | singlet | 2.06 | >1000 | >1000 |
| | C1021 | 12m | singlet | 2.53 | >1000 | >1000 |
| | C1022 | 12m | singlet | 1.66 | >1000 | >1000 |
| | C1023 | 12m | singlet | 1.13 | >1000 | >1000 |
| | C1024 | 12m | singlet | 2.37 | 64.49 | 433.22 |
| COV107 | C903 | 12m | singlet | 2.54 | 7.22 | 43.94 |
| | C904 | 12m | singlet | 3.31 | 5.60 | 52.20 |
| | C905 | 12m | singlet | 3.06 | 76.04 | >1000 |
| | C906 | 12m | clone | 1.07 | 4.91 | 62.34 |
| | C907 | 12m | singlet | 3.71 | 793.15 | >1000 |
| | C908 | 12m | singlet | 1.27 | 89.77 | >1000 |
| | C909 | 6.2m | singlet | 3.24 | 4.12 | 20.64 |
| | C910 | 12m | singlet | 2.47 | 2.66 | 18.91 |
| | C911 | 6.2m | clone | 2.36 | >1000 | >1000 |
| | C912 | 12m | singlet | 2.45 | >1000 | >1000 |
| | C913 | 12m | singlet | 2.58 | 16.08 | 93.22 |
| | C914 | 6.2m | clone | 1.59 | 182.76 | >1000 |
| | C915 | 12m | singlet | 3.49 | 94.45 | >1000 |
| | C916 | 1.3m | singlet | 1.97 | >1000 | >1000 |
| | C917 | 12m | singlet | 1.05 | >1000 | >1000 |
| | C918 | 6.2m | singlet | 1.78 | 3.66 | 16.06 |
| | C919 | 12m | singlet | 2.31 | 3.57 | 13.19 |
| | C920 | 6.2m | singlet | 2.35 | 10.47 | 176.41 |
| | C921 | 12m | singlet | 3.91 | 233.09 | >1000 |
| | C922 | 6.2m | singlet | 2.42 | 2.34 | 11.58 |
| | C923 | 12m | singlet | 1.95 | 2.81 | 26.12 |
| | C924 | 1.3m | singlet | 2.50 | 90.56 | 902.66 |
| | C925 | 12m | singlet | 2.26 | 38.03 | 222.87 |
| | C926 | 12m | singlet | 4.72 | 4.01 | 20.33 |
| | C927 | 6.2m | clone | 3.77 | 267.25 | >1000 |
| | C928 | 12m | singlet | 4.14 | 89.53 | >1000 |
| | C929 | 1.3m | singlet | 2.07 | 7.81 | 42.17 |
| | C930 | 12m | singlet | 1.24 | 12.25 | 49.59 |
| | C931 | 6.2m | singlet | 2.57 | 5.48 | 117.46 |
| | C932 | 12m | singlet | 3.57 | 3.62 | 17.92 |
| | C933 | 1.3m | singlet | 1.77 | 9.85 | 157.73 |
| | C934 | 12m | singlet | 0.95 | 8.52 | 86.95 |
| | C935 | 12m | singlet | 2.86 | 859.85 | >1000 |
| | C936 | 1.3m | clone | 1.56 | 10.13 | 66.57 |
| | C937 | 12m | singlet | 0.97 | 13.44 | 78.15 |
| | C938 | 6.2m | singlet | 2.63 | 11.43 | 60.49 |
| | C939 | 12m | singlet | 3.62 | 5.86 | 24.08 |
| | C940 | 12m | singlet | 1.80 | 9.33 | 101.43 |
| | C941 | 12m | singlet | 0.88 | 148.62 | >1000 |
| | C942 | 12m | singlet | 1.35 | >1000 | >1000 |
| | C943 | 12m | singlet | 2.59 | 87.03 | >1000 |
| | C944 | 12m | singlet | 1.71 | >1000 | >1000 |
| | C945 | 12m | singlet | 3.13 | >1000 | >1000 |
| | C946 | 12m | singlet | 3.82 | >1000 | >1000 |
| | C947 | 12m | singlet | 2.08 | 3.88 | 22.05 |
| | C948 | 12m | singlet | 3.26 | >1000 | >1000 |
| | C949 | 12m | singlet | 2.33 | >1000 | >1000 |
| | C951 | 12m | singlet | 0.81 | 7.77 | 47.78 |
| COV96 | C1025 | 12m | clone | 2.51 | 715.40 | >1000 |
| | C1026 | 12m | singlet | 2.50 | 573.33 | >1000 |
| | C1027 | 12m | clone | 2.42 | 14.71 | 66.76 |
| | C1028 | 12m | singlet | 3.58 | 110.95 | >1000 |
| | C1029 | 12m | singlet | 2.86 | 839.14 | >1000 |
| | C1030 | 12m | clone | 2.78 | 12.38 | 103.08 |
| | C1031 | 12m | clone | 7.23 | >1000 | >1000 |
| | C1032 | 12m | singlet | 2.89 | 8.71 | 118.93 |
| | C1033 | 12m | singlet | 3.63 | >1000 | >1000 |
| | C1034 | 12m | singlet | 2.77 | 65.08 | >1000 |
| | C1035 | 1.3m | singlet | 2.05 | 16.26 | 153.46 |
| | C1036 | 12m | singlet | 1.02 | 21.28 | 86.34 |
| | C1038 | 1.3m | clone | 2.46 | 76.71 | >1000 |
| | C1039 | 12m | singlet | 2.61 | 198.05 | >1000 |
| | C1040 | 12m | singlet | 2.08 | 53.92 | >1000 |
| | C1041 | 6.2m | clone | 3.65 | >1000 | >1000 |
| | C1042 | 12m | singlet | 4.55 | >1000 | >1000 |
| | C1043 | 12m | singlet | 2.77 | 30.33 | 163.48 |
| | C1044 | 1.3m | clone | 3.22 | 782.77 | >1000 |
| | C1045 | 12m | singlet | 2.57 | >1000 | >1000 |
| | C1046 | 1.3m | singlet | 3.80 | >1000 | >1000 |
| | C1047 | 12m | singlet | 2.46 | 112.00 | >1000 |
| | C1048 | 6.2m | singlet | 2.41 | 90.54 | >1000 |
| | C1049 | 12m | singlet | 2.81 | 157.42 | >1000 |
| | C1050 | 6.2m | singlet | 2.78 | >1000 | >1000 |
| | C1051 | 12m | singlet | 1.40 | >1000 | >1000 |
| | C1052 | 12m | singlet | 2.64 | 6.92 | 44.91 |
| | C1053 | 6.2m | clone | 4.13 | >1000 | >1000 |
| | C1054 | 12m | singlet | 1.64 | >1000 | >1000 |
| | C1055 | 6.2m | singlet | 2.71 | >1000 | >1000 |
| | C1056 | 12m | singlet | 1.76 | 304.35 | >1000 |
| | C1057 | 12m | singlet | 2.12 | >1000 | >1000 |
| | C1058 | 6.2m | clone | 2.13 | 17.12 | 64.95 |
| | C1059 | 12m | singlet | 1.69 | 24.15 | 56.71 |
| | C1060 | 12m | singlet | 2.67 | 14.70 | 91.33 |
| | C1061 | 6.2m | clone | 2.26 | >1000 | >1000 |
| | C1062 | 12m | singlet | 2.61 | >1000 | >1000 |
| | C1063 | 12m | singlet | 3.04 | 104.46 | 790.04 |
| | C1065 | 12m | singlet | 3.52 | 8.28 | 173.34 |
| | C1066 | 12m | singlet | 3.01 | 34.85 | 642.26 |
| | C1067 | 12m | singlet | 2.93 | >1000 | >1000 |
| | C1068 | 12m | singlet | 2.48 | 33.86 | 252.03 |
| | C1069 | 6.2m | singlet | n.d. | n.d. | n.d. |

TABLE 4
Binding & Neutralization shared clones and singlets 1 year

| | | | | | | | | | | | mAb 1.3 | | | | | |
|---|---|---|---|---|---|---|---|---|---|---|---|---|---|---|---|---|
| | | mAb 1.3 months | | | mAb 6 months | | | mAb 12 months | | | months | | mAb 6 months | | mAb 12 months | |
| | | | IC50 | IC90 | | IC50 | IC90 | | IC50 | IC90 | | EC50 | | EC50 | | EC50 |
| participant | | ID | [ng/ml] | [ng/ml] | ID | [ng/ml] | [ng/ml] | ID | [ng/ml] | [ng/ml] | ID | [ng/ml] | ID | [ng/ml] | ID | [ng/ml] |
| 21 | Shared | C006 | 321.51 | >1000 | C950 | 8.40 | 51.19 | C837 | 8.61 | 48.75 | C006 | 0.92 | C950 | 2.15 | C837 | 2.03 |
| | clones | C028 | 19.41 | 204.61 | C046 | 8.69 | 52.59 | C838 | 2.90 | 25.59 | C028 | 1.35 | C046 | 4.02 | C838 | 3.03 |
| | | C010 | >1000 | >1000 | | | | C840 | >1000 | >1000 | C010 | 2.8 | | | C840 | 1.36 |
| | | C044 | >1000 | >1000 | C045 | >1000 | >1000 | C841 | >1000 | >1000 | C044 | >1000 | C045 | 7 | C841 | 3.15 |
| | | | | | C855 | 20.28 | 41.64 | C842 | 8.44 | 45.08 | | | C855 | 2.73 | C842 | 3.01 |
| | | C856 | >1000 | >1000 | | | | C843 | >1000 | >1000 | C856 | 2.65 | | | C843 | 2.40 |
| | | C857 | >1000 | >1000 | | | | C845 | 494.25 | 1000.00 | C857 | 2.01 | | | C845 | 1.50 |
| | | C858 | >1000 | >1000 | | | | C846 | 423.80 | >1000 | C858 | 3.27 | | | C846 | 3.48 |
| | | | | | C701 | >1000 | >1000 | C848 | >1000 | >1000 | | | C701 | 2.94 | C848 | 2.23 |
| | | | | | C859 | >1000 | >1000 | C849 | >1000 | >1000 | | | C859 | 2.75 | C849 | 3.64 |
| | | C860 | >1000 | >1000 | | | | C852 | 470.20 | >1000 | C860 | 2.61 | | | C852 | 4.59 |
| | | C861 | 489.37 | >1000 | | | | C853 | 11.43 | 30.37 | C861 | 3.61 | | | C853 | 2.30 |
| | 1 yr only | | | | | | | C839 | >1000 | >1000 | | | | | C839 | 4.38 |
| | clones | | | | | | | C844 | 972.33 | >1000 | | | | | C844 | 1.53 |
| | | | | | | | | C847 | 411.22 | >1000 | | | | | C850 | 3.70 |
| | | | | | | | | C850 | 61.93 | 436.21 | | | | | C851 | 2.83 |
| | | | | | | | | C851 | 12.93 | 33.10 | | | | | C854 | 2.57 |
| | | | | | | | | C854 | 19.73 | 107.13 | | | | | C847 | 3.06 |
| | random | | | | | | | C863 | 167.32 | >1000 | | | | | C863 | 3.31 |
| | singlets | | | | | | | C864 | 12.14 | 31.89 | | | | | C864 | 1.89 |
| | | | | | | | | C865 | >1000 | >1000 | | | | | C865 | 2.14 |
| | | | | | | | | C866 | >1000 | >1000 | | | | | C866 | 2.00 |
| | | | | | | | | C867 | 13.47 | 37.26 | | | | | C867 | 2.71 |
| | | | | | | | | C868 | 61.26 | 238.40 | | | | | C868 | 3.39 |
| | | | | | | | | C869 | 145.34 | >1000 | | | | | C869 | 3.14 |
| | | | | | | | | C870 | >1000 | >1000 | | | | | C870 | 2.17 |
| | | | | | | | | C862 | >1000 | >1000 | | | | | C862 | 2.14 |
| | | | | | | | | C894 | 97.11 | 266.28 | | | | | C894 | 16.77 |
| 47 | Shared | C145 | 3.04 | 36.79 | C050 | 12.92 | 28.41 | C871 | 13.15 | 32.24 | C145 | 2.10 | C050 | 193 | C871 | 1.52 |
| | clones | C144 | 2.86 | 40.53 | C051 | 12.51 | 91.96 | C872 | 11.18 | 56.82 | C144 | 1.83 | C051 | 1.65 | C872 | 2.19 |
| | | | | | C052 | 4.89 | 27.79 | | | | | | C052 | 1.23 | | |
| | | | | | C053 | 8.23 | 39.80 | | | | | | C053 | 1.53 | | |
| | | | | | C054 | 4.84 | 15.5 | | | | | | C054 | 1.58 | | |
| | | C058 | 5.28 | 31.55 | C057 | 2.78 | 33.59 | C873 | 5.29 | 74.64 | C058 | 2.28 | C057 | 2.31 | C873 | 4.05 |
| | | | | | C059 | 8.35 | 24.49 | | | | | | C059 | 1.88 | | |
| | | C151 | >1000 | >1000 | C062 | 703.61 | >1000 | C874 | 436.83 | >1000 | C151 | 15.02 | C062 | 4.69 | C874 | 5.20 |
| | | C087 | 225.74 | >1000 | C088 | 14.54 | 47.15 | C875 | 8.09 | 49.42 | C087 | 2.62 | C088 | 2.44 | C875 | 3.50 |
| | | | | | C518 | 31.03 | 78.53 | C877 | 15.71 | 48.06 | | | C518 | 1.13 | C877 | 2.53 |
| | | C885 | >1000 | >1000 | | | | C879 | 181.34 | >1000 | C885 | 7.45 | | | C879 | 4.25 |
| | | | | | C884 | 37.14 | >1000 | C880 | 23.83 | 332.32 | | | C884 | 4.22 | C880 | 2.20 |
| | | C153 | 70.71 | >1000 | | | | C881 | 9.85 | 57.41 | C153 | 3.17 | | | C881 | 1.88 |
| | | | | | C883 | n.d. | n.d. | C882 | >1000 | >1000 | | | C883 | n.d. | C882 | 2.90 |
| | | | | | C887 | 2.07 | 11.04 | C886 | 78.28 | >1000 | | | C887 | 3.20 | C886 | 2.48 |
| | | C888 | 85.84 | 469.41 | | | | C889 | 6.07 | 70.12 | C888 | 1.44 | | | C889 | 0.80 |
| | | | | | C069 | 10.04 | 99.15 | C890 | 2.92 | 41.61 | | | C069 | 381.40 | C890 | 9.68 |
| | | C891 | >1000 | >1000 | | | | C892 | 62.71 | >1000 | C891 | 2.14 | | | C892 | 1.83 |
| | 1 yr only | | | | | | | C876 | 7.44 | 38.03 | | | | | C876 | 3.53 |
| | clones | | | | | | | C878 | >1000 | >1000 | | | | | C878 | 2.88 |
| | random | | | | | | | C893 | 115.91 | >1000 | | | | | C893 | 3.73 |
| | singlets | | | | | | | C895 | >1000 | >1000 | | | | | C895 | 2.21 |
| | | | | | | | | C896 | >1000 | >1000 | | | | | C896 | 4.30 |
| | | | | | | | | C897 | >1000 | >1000 | | | | | C897 | 1.88 |
| | | | | | | | | C898 | >1000 | >1000 | | | | | C898 | 7.60 |
| | | | | | | | | C899 | 7.93 | 42.90 | | | | | C899 | 2.23 |
| | | | | | | | | C900 | 13.62 | 70.01 | | | | | C900 | 2.54 |
| | | | | | | | | C901 | 358.70 | >1000 | | | | | C901 | 2.01 |
| | | | | | | | | C902 | 8.77 | 49.52 | | | | | C902 | 3.39 |
| 57 (vac) | Shared | C032 | 75.71 | 1402.00 | C080 | 44.28 | 1888.45 | C952 | 7.66 | 32.20 | C032 | 26.89 | C080 | 1.97 | C952 | 2.40 |
| | clones | | | | | | | C986 | 25.95 | 218.32 | | | | | C986 | 3.36 |
| | | C953 | >1000 | >1000 | | | | C954 | 10.93 | 33.05 | C953 | 4.09 | | | C954 | 1.48 |
| | | C039 | 23.80 | 332.89 | | | | C955 | 2.76 | 35.27 | C039 | 1.26 | | | C955 | 2.44 |
| | | | | | C986 | 17.76 | 67.57 | C957 | 16.44 | 60.03 | | | C956 | 1.58 | C957 | 1.93 |
| | | C093 | 22.80 | 81.34 | C094 | 470.54 | 1472.13 | C959 | 10.15 | 51.74 | C093 | 1.02 | C094 | 1.67 | C959 | 4.58 |
| | | C038 | >1000 | >1000 | | | | C960 | 127.01 | >1000 | C038 | 4.69 | | | C960 | 1.62 |
| | | | | | C961 | 19.22 | 59.56 | C962 | 12.93 | 87.60 | | | C961 | 2.57 | C962 | 1.74 |
| | | | | | C967 | 14.64 | 33.53 | C968 | 5.73 | 63.15 | | | C967 | 3.58 | C968 | 3.19 |
| | | C969 | 585.28 | >1000 | | | | C987 | 9.16 | 50.96 | C969 | 3.49 | | | C987 | 3.11 |
| | | | | | C988 | n.d. | n.d. | C989 | 41.45 | 786.13 | | | C988 | n.d. | C989 | 4.12 |
| | | | | | C974 | >1000 | >1000 | C975 | >1000 | >1000 | | | C974 | 2.94 | C975 | 2.88 |
| | | | | | C521 | 11.30 | 61.22 | C990 | 2.87 | 34.80 | | | C521 | 6.90 | C990 | 1.92 |
| | | | | | C991 | 50.21 | >1000 | C992 | 33.65 | 511.76 | | | C991 | 3.46 | C992 | 3.24 |
| | 1 yr only | | | | | | | C958 | 379.01 | >1000 | | | | | C958 | 4.02 |
| | clones | | | | | | | C963 | 78.09 | >1000 | | | | | C963 | 2.96 |
| | | | | | | | | C964 | >1000 | >1000 | | | | | C964 | 2.79 |
| | | | | | | | | C965 | 2.63 | 18.57 | | | | | C965 | 1.69 |
| | | | | | | | | C966 | >1000 | >1000 | | | | | C966 | 1.97 |
| | | | | | | | | C971 | 90.43 | >1000 | | | | | C971 | 2.21 |
| | | | | | | | | C972 | 11.52 | 46.20 | | | | | C972 | 2.18 |
| | | | | | | | | C973 | 5.71 | 41.11 | | | | | C973 | 2.87 |
| | | | | | | | | C976 | >1000 | >1000 | | | | | C976 | 2.52 |
| | | | | | | | | C978 | 121.85 | >1000 | | | | | C978 | 2.09 |
| | | | | | | | | C993 | 8.94 | 43.82 | | | | | C993 | 2.29 |
| | | | | | | | | C996 | 38.98 | 338.75 | | | | | C996 | 3.07 |
| | random | | | | | | | C977 | >1000 | >1000 | | | | | C977 | 2.13 |
| | singlets | | | | | | | C979 | >1000 | >1000 | | | | | C979 | 2.54 |
| | | | | | | | | C980 | 3.80 | 36.05 | | | | | C980 | 4.07 |
| | | | | | | | | C981 | 459.46 | >1000 | | | | | C981 | 2.12 |
| | | | | | | | | C982 | >1000 | >1000 | | | | | C982 | 2.56 |
| | | | | | | | | C983 | >1000 | >1000 | | | | | C983 | 2.11 |
| | | | | | | | | C984 | 2.64 | 17.31 | | | | | C984 | 2.76 |
| | | | | | | | | C985 | 6.79 | 31.38 | | | | | C985 | 3.67 |
| | | | | | | | | C994 | 86.71 | >1000 | | | | | C994 | 2.09 |
| | | | | | | | | C995 | 5.99 | 37.61 | | | | | C995 | 3.79 |
| 72 | Shared | C128 | 70.06 | 274.60 | C513 | 12.86 | 88.44 | C997 | 7.42 | 96.40 | C128 | 2.28 | C513 | 1.31 | C997 | 3.49 |
| | clones | | | | C998 | >1000 | >1000 | C999 | >1000 | >1000 | | | C998 | 2.51 | C999 | 2.68 |
| | | | | | C1000 | >1000 | >1000 | C1001 | >1000 | >1000 | | | C1000 | 3.20 | C1001 | 3.23 |
| | | C517 | 11.31 | 49.51 | C514 | 22.28 | 86.32 | C1002 | 22.51 | 72.62 | C517 | 0.87 | C514 | 0.82 | C1002 | 0.83 |
| | | C129 | 10.85 | 59.47 | | | | C1003 | 2.40 | 19.43 | C129 | 1.39 | | | C1003 | 1.82 |
| | | | | | C1006 | 42.01 | 418.90 | C1007 | 52.22 | 225.87 | | | C1006 | 2.04 | C1007 | 3.22 |
| | | C1008 | 697.10 | >1000 | | | | C1009 | 5.23 | 34.85 | C1008 | 17.23 | | | C1009 | 1.34 |
| | | C1010 | >1000 | >1000 | | | | C1011 | >1000 | >1000 | C1010 | 2.45 | | | C1011 | 1.49 |
| | | C1012 | 410.41 | >1000 | | | | C1013 | 65.35 | 193.34 | C1012 | 3.29 | | | C1013 | 8.92 |
| | 1 yr only | | | | | | | C1014 | >1000 | >1000 | | | | | C1014 | 2.95 |
| | clones | | | | | | | | | | | | | | | |
| | random | | | | | | | C1015 | >1000 | >1000 | | | | | C1015 | >1000 |
| | singlets | | | | | | | C1016 | 30.39 | 111.92 | | | | | C1016 | 2.16 |
| | | | | | | | | C1018 | >1000 | >1000 | | | | | C1018 | 3.09 |
| | | | | | | | | C1019 | 30.25 | >1000 | | | | | C1019 | 2.80 |
| | | | | | | | | C1020 | >1000 | >1000 | | | | | C1020 | 2.06 |
| | | | | | | | | C1021 | >1000 | >1000 | | | | | C1021 | 2.53 |
| | | | | | | | | C1022 | >1000 | >1000 | | | | | C1022 | 1.66 |
| | | | | | | | | C1023 | >1000 | >1000 | | | | | C1023 | 1.13 |
| | | | | | | | | C1024 | 64.49 | 433.22 | | | | | C1024 | 2.37 |
| 96 (vac) | Shared | C201 | >1000 | >1000 | C539 | 657.71 | >1000 | C1025 | 715.40 | >1000 | C501 | 1.58 | C539 | 1.30 | C1025 | 2.51 |
| | clones | | | | C1069 | n.d. | n.d. | C1026 | 573.33 | >1000 | | | C1069 | n.d. | C1026 | 2.50 |
| | | C202 | 323.96 | >1000 | C642 | 16.46 | 97.25 | C1027 | 14.71 | 66.76 | C202 | 1.59 | C542 | 1.07 | C1027 | 2.42 |
| | | C547 | >1000 | >1000 | C543 | >1000 | >1000 | C1028 | 110.95 | >1000 | C547 | 1.78 | C543 | 1.28 | C1028 | 3.58 |
| | | | | | C562 | >1000 | >1000 | C1029 | 839.14 | >1000 | | | C562 | 2.55 | C1029 | 2.86 |
| | | | | | C538 | >1000 | >1000 | C1031 | >1000 | >1000 | | | C538 | 3.94 | C1031 | 8.71 |
| | | | | | C533 | 14.15 | 98.87 | C1032 | 8.71 | 118.93 | | | C533 | 1.61 | C1032 | 2.89 |
| | | | | | C534 | >1000 | >1000 | C1033 | >1000 | >1000 | | | C534 | 4.85 | C1033 | 3.63 |
| | | | | | C537 | >1000 | >1000 | C1034 | 65.08 | >1000 | | | C537 | 41.85 | C1034 | 2.77 |
| | | C1035 | 16.26 | 153.46 | | | | C1036 | 21.28 | 86.34 | C1035 | 2.05 | | | C1036 | 1.76 |
| | | C1038 | 76.71 | >1000 | | | | C1039 | 198.05 | >1000 | C1038 | 2.46 | | | C1039 | 2.61 |
| | | | | | C1041 | >1000 | >1000 | C1042 | >1000 | >1000 | | | C1041 | 3.65 | C1042 | 4.55 |
| | | C1044 | 782.77 | >1000 | | | | C1045 | >1000 | >1000 | C1044 | 3.22 | | | C1045 | 2.57 |
| | | C1046 | >1000 | >1000 | | | | C1047 | 112.00 | >1000 | C1046 | 3.80 | | | C1047 | 2.46 |
| | | | | | C1048 | 90.54 | >1000 | C1049 | 157.42 | >1000 | | | C1048 | 2.41 | C1049 | 2.81 |
| | | | | | C1050 | >1000 | >1000 | C1051 | 1000.00 | 1000.00 | | | C1050 | 2.78 | C1051 | 1.40 |
| | | | | | C1053 | >1000 | >1000 | C1054 | >1000 | >1000 | | | C1053 | 4.13 | C1054 | 1.84 |
| | | | | | C1055 | >1000 | >1000 | C1056 | 304.35 | >1000 | | | C1055 | 2.71 | C1056 | 1.76 |
| | | | | | C1058 | 17.12 | 64.95 | C1059 | 24.15 | 56.71 | | | C1058 | 2.13 | C1059 | 2.17 |
| | | | | | C1061 | >1000 | >1000 | C1062 | >1000 | >1000 | | | C1061 | 2.26 | C1062 | 2.61 |
| | 1 yr only | | | | | | | C1030 | 12.38 | 103.08 | | | | | C1030 | 2.78 |
| | clones | | | | | | | C1040 | 53.92 | >1000 | | | | | C1040 | 2.08 |
| | | | | | | | | C1043 | 30.33 | 163.48 | | | | | C1043 | 2.77 |
| | | | | | | | | C1052 | 6.92 | 44.91 | | | | | C1052 | 2.64 |
| | | | | | | | | C1057 | >1000 | >1000 | | | | | C1057 | 2.17 |
| | | | | | | | | C1060 | 14.70 | 91.33 | | | | | C1060 | 2.67 |
| | random | | | | | | | C1063 | 104.46 | 790.04 | | | | | C1063 | 3.04 |
| | singlets | | | | | | | C1065 | 8.28 | 173.34 | | | | | C1065 | 3.52 |
| | | | | | | | | C1066 | 34.85 | 642.26 | | | | | C1066 | 3.01 |
| | | | | | | | | C1067 | >1000 | >1000 | | | | | C1067 | 2.93 |
| | | | | | | | | C1068 | 33.86 | 252.03 | | | | | C1068 | 2.48 |
| 107 | Shared | C101 | 8.20 | 65.30 | | | | C903 | 7.22 | 43.94 | C101 | 1.51 | | | C903 | 2.54 |
| | clones | C102 | 34.03 | 143.23 | | | | | | | C102 | 4.54 | | | | |
| | | C103 | 4.38 | 23.59 | | | | C904 | 5.60 | 52.20 | C103 | 3.77 | | | C904 | 3.31 |
| | | C104 | 23.31 | 140.28 | | | | | | | C104 | 8.31 | | | | |
| | | C161 | 42.32 | 581.63 | | | | | | | C161 | 1.63 | | | | |
| | | C162 | 14.44 | 138.75 | | | | | | | C162 | 1.78 | | | | |
| | | C163 | 9.65 | 57.97 | | | | | | | C163 | 1.77 | | | | |
| | | | | | C566 | 128.68 | >1000 | C905 | 76.04 | >1000 | | | C566 | 5.88 | C905 | 3.06 |
| | | C115 | 252.22 | >1000 | C572 | 72.63 | >1000 | C906 | 4.91 | 62.34 | C115 | 3.15 | C572 | 2.90 | C906 | 1.07 |
| | | | | | C570 | 207.05 | >1000 | C907 | 793.15 | >1000 | | | C570 | 0.74 | C907 | 3.71 |
| | | C581 | 31.57 | 351.60 | C580 | 116.79 | 575.02 | C908 | 89.77 | >1000 | C581 | 1.58 | C580 | 1.81 | C908 | 1.27 |
| | | | | | C909 | 4.12 | 20.64 | C910 | 2.66 | 18.91 | | | C909 | 3.24 | C910 | 2.47 |
| | | | | | C911 | >1000 | >1000 | C912 | >1000 | >1000 | | | C911 | 2.36 | C912 | 2.45 |
| | | | | | C914 | 182.76 | >1000 | C915 | 94.45 | >1000 | | | C914 | 1.59 | C915 | 3.49 |
| | | C916 | >1000 | >1000 | | | | C917 | >1000 | >1000 | C916 | 1.97 | | | C917 | 1.05 |
| | | | | | C918 | 3.66 | 16.06 | C919 | 3.57 | 13.19 | | | C918 | 1.78 | C919 | 2.31 |
| | | | | | C920 | 10.47 | 176.41 | C921 | 233.09 | >1000 | | | C920 | 2.35 | C921 | 3.91 |
| | | | | | C922 | 2.34 | 11.58 | C923 | 2.81 | 26.12 | | | C922 | 2.42 | C923 | 1.95 |
| | | C924 | 90.56 | 902.66 | | | | C925 | 38.03 | 222.87 | C924 | 2.5 | | | C925 | 2.26 |
| | | | | | C927 | 267.25 | >1000 | C928 | 89.53 | >1000 | | | C927 | 3.77 | C928 | 4.14 |
| | | C929 | 7.81 | 42.17 | | | | C930 | 12.25 | 49.59 | C929 | 2.07 | | | C930 | 1.24 |
| | | | | | C931 | 5.48 | 117.46 | C932 | 3.62 | 17.92 | | | C931 | 2.57 | C932 | 3.57 |
| | | C933 | 9.85 | 157.73 | | | | C934 | 8.52 | 86.95 | C933 | 1.77 | | | C934 | 0.95 |
| | | C936 | 10.13 | 66.57 | | | | C937 | 13.44 | 78.15 | C936 | 1.56 | | | C937 | 0.97 |
| | | | | | C938 | 11.43 | 60.49 | C939 | 5.86 | 24.08 | | | C938 | 2.63 | C939 | 3.62 |
| | | C108 | 480.69 | >1000 | C573 | 13.41 | 117.64 | C951 | 7.77 | 47.78 | C108 | 14.97 | C573 | 2.2 | C951 | 0.81 |
| | 1 yr only | | | | | | | C913 | 16.08 | 93.22 | | | | | C913 | 2.58 |
| | clones | | | | | | | C926 | 4.01 | 20.33 | | | | | C926 | 4.72 |
| | | | | | | | | C935 | 859.85 | >1000 | | | | | C935 | 2.86 |
| | random | | | | | | | C940 | 9.33 | 101.43 | | | | | C940 | 1.80 |
| | singlets | | | | | | | C941 | 148.62 | >1000 | | | | | C941 | 1.92 |
| | | | | | | | | C942 | >1000 | >1000 | | | | | C942 | 2.13 |
| | | | | | | | | C943 | 87.03 | >1000 | | | | | C943 | 2.59 |
| | | | | | | | | C944 | >1000 | >1000 | | | | | C944 | 1.71 |
| | | | | | | | | C945 | >1000 | >1000 | | | | | C945 | 3.13 |
| | | | | | | | | C946 | >1000 | >1000 | | | | | C946 | 3.82 |
| | | | | | | | | C947 | 3.88 | 22.05 | | | | | C947 | 2.08 |
| | | | | | | | | C948 | >1000 | >1000 | | | | | C948 | 3.26 |
| | | | | | | | | C949 | >1000 | >1000 | | | | | C949 | 2.33 |

TABLE 5
Neutralization activity of mAbs against mutant SRAS-CoV-2 pseudovirsues -
Random potently neutralizing antibodies isolated at 1.3 and 12 months

| | | wt | | R683G | | R346S | | K417N | |
|---|---|---|---|---|---|---|---|---|---|
| | | IC50 | IC90 | IC50 | IC90 | IC50 | IC90 | IC50 | IC90 |
| | ID | [ng/ml] | [ng/ml] | [ng/ml] | [ng/ml] | [ng/ml] | [ng/ml] | [ng/ml] | [ng/ml] |
| 1.3 m | C120 | 5.56 | 34.57 | 3.03 | 18.01 | 4.47 | 25.14 | 97.58 | 751.21 |
| 1.3 m | C121 | 5.10 | 19.82 | 1.67 | 10.83 | 3.63 | 15.59 | 3.10 | 16.33 |
| 1.3 m | C129 | 9.66 | 52.87 | 1.18 | 29.74 | 8.11 | 36.51 | 2.35 | 10.66 |
| 1.3 m | C135 | 8.59 | 40.63 | 2.71 | 22.82 | >1000 | >1000 | 3.48 | 14.69 |
| 1.3 m | C144 | 3.74 | 15.88 | 1.23 | 6.66 | 3.41 | 16.74 | 1.84 | 11.51 |
| 1.3 m | C162 | 21.37 | 162.39 | 10.88 | 192.71 | 9.76 | 48.83 | 5.94 | 59.59 |
| 1.3 m | C515 | 100.94 | 61.39 | 8.39 | 65.35 | 10.18 | 45.58 | 10.98 | 71.48 |
| 1.3 m | C516 | 4.07 | 19.14 | 1.21 | 11.02 | 2.85 | 15.07 | 1.78 | 8.82 |
| 1.3 m | C517 | 10.53 | 52.68 | 3.33 | 19.51 | 7.93 | 52.12 | >1000 | >1000 |
| 1.3 m | C578 | 15.72 | 94.93 | 13.86 | 122.71 | 14.26 | 56.44 | 7.74 | 39.00 |
| 1.3 m | C597 | 3.19 | 14.31 | 2.22 | 12.22 | 3.03 | 10.29 | 2.10 | 8.36 |
| 1.3 m | C929 | 11.77 | 60.46 | 3.29 | 18.20 | 8.81 | 52.18 | 10.15 | 70.48 |
| 1.3 m | C933 | 20.36 | 135.76 | 12.37 | 143.30 | 15.08 | 132.11 | 24.03 | 207.89 |
| 1.3 m | C936 | 12.36 | 97.27 | 4.74 | 52.47 | 10.82 | 101.27 | >1000 | >1000 |
| 1.3 m | C1035 | 18.37 | 102.80 | 8.27 | 61.32 | 14.28 | 83.64 | 30.54 | 282.79 |
| 12 m | C846 | 16.38 | 53.70 | 1.09 | 5.82 | 9.63 | 35.29 | 6.43 | 28.21 |
| 12 m | C900 | 17.73 | 64.31 | 2.72 | 21.21 | 12.21 | 46.95 | 11.52 | 333.74 |
| 12 m | C902 | 14.88 | 67.29 | 4.23 | 33.27 | 11.80 | 49.62 | >1000 | >1000 |
| 12 m | C906 | 13.45 | 63.10 | 5.30 | 60.57 | 14.41 | 63.99 | 2.50 | 14.88 |
| 12 m | C952 | 11.95 | 60.17 | 0.49 | 2.85 | 7.05 | 32.95 | 5.75 | 29.14 |
| 12 m | C954 | 11.38 | 51.13 | 1.52 | 8.95 | 727.97 | >1000 | 5.88 | 24.65 |
| 12 m | C955 | 4.53 | 21.81 | 0.97 | 6.06 | 3.05 | 14.48 | 1.70 | 8.61 |
| 12 m | C959 | 9.60 | 43.37 | 1.46 | 6.52 | 5.83 | 24.91 | 1.47 | 7.40 |
| 12 m | C962 | 17.82 | 62.36 | 5.34 | 30.74 | 13.42 | 47.32 | 3.26 | 16.56 |
| 12 m | C973 | 10.26 | 38.89 | 1.37 | 8.26 | 7.17 | 22.70 | 4.22 | 16.97 |
| 12 m | C993 | 14.76 | 46.01 | 1.73 | 10.23 | 9.70 | 27.14 | 2.24 | 9.65 |
| 12 m | C995 | 6.79 | 50.33 | 2.37 | 33.81 | 4.71 | 26.56 | 2.14 | 12.34 |
| 12 m | C1002 | 23.30 | 81.23 | 2.61 | 22.57 | 19.22 | 77.39 | 8.45 | 69.81 |
| 12 m | C1003 | 6.49 | 22.36 | 0.32 | 2.11 | 5.60 | 19.28 | 2.17 | 8.74 |
| 12 m | C1009 | 8.80 | 35.11 | 2.27 | 13.55 | 7.17 | 32.24 | 2.78 | 13.77 |

E484K

| | N440K | | A475V | | (R683G) | | N501Y | |
|---|---|---|---|---|---|---|---|---|
| | IC50 | IC90 | IC50 | IC90 | IC50 | IC90 | IC50 | IC90 |
| | [ng/ml] | [ng/ml] | [ng/ml] | [ng/ml] | [ng/ml] | [ng/ml] | [ng/ml] | [ng/ml] |
| 1.3 m | 4.88 | 25.50 | 142.61 | 918.38 | 3.39 | 20.10 | 5.35 | 25.95 |
| 1.3 m | 3.50 | 18.17 | 2.53 | 18.29 | >1000 | >1000 | 3.75 | 18.94 |
| 1.3 m | 5.96 | 38.24 | 5.87 | 31.85 | >1000 | >1000 | 11.56 | 80.65 |
| 1.3 m | >1000 | >1000 | 4.61 | 27.22 | 1.99 | 19.97 | 12.92 | 140.51 |
| 1.3 m | 2.40 | 13.52 | 3.19 | 16.23 | >1000 | >1000 | 3.05 | 18.87 |
| 1.3 m | 18.91 | 150.27 | 9.62 | 80.73 | >1000 | >1000 | 25.88 | 163.70 |
| 1.3 m | 10.52 | 62.14 | 160.59 | >1000 | 15.47 | 84.56 | 691.46 | >1000 |
| 1.3 m | 3.03 | 20.63 | 2.17 | 14.32 | >1000 | >1000 | 4.07 | 25.26 |
| 1.3 m | 8.75 | 50.88 | 7.44 | 38.28 | 5.16 | 29.65 | 9.00 | 60.49 |
| 1.3 m | 18.83 | 69.55 | 12.73 | 59.11 | >1000 | >1000 | 52.62 | 273.71 |
| 1.3 m | 3.41 | 13.55 | 8.28 | 35.03 | 13.11 | 53.42 | 3.77 | 14.98 |
| 1.3 m | 8.22 | 49.22 | 30.70 | 187.51 | 4.43 | 26.79 | 92.36 | 615.77 |
| 1.3 m | 16.88 | 135.23 | 27.87 | 267.51 | >1000 | >1000 | 54.09 | 335.67 |
| 1.3 m | 12.14 | 89.94 | 151.55 | >1000 | 10.36 | 95.30 | >1000 | >1000 |
| 1.3 m | 15.80 | 95.21 | 41.30 | 488.33 | 16.58 | 99.61 | 17.10 | 88.99 |
| 12 m | 11.62 | 39.91 | 6.35 | 19.39 | 2.20 | 12.64 | 10.10 | 46.73 |
| 12 m | 13.30 | 49.43 | 7.31 | 30.47 | 79.49 | >1000 | 15.14 | 56.88 |
| 12 m | 13.25 | 45.09 | 11.63 | 49.21 | 5.39 | 46.04 | 14.21 | 59.79 |
| 12 m | 14.05 | 68.86 | 5.31 | 25.05 | >1000 | >1000 | 79.04 | 487.19 |
| 12 m | 4.26 | 20.57 | 7.11 | 30.99 | 0.45 | 2.10 | 10.53 | 76.13 |
| 12 m | 9.53 | 37.95 | 5.40 | 23.41 | 3.39 | 23.31 | 11.99 | 37.49 |
| 12 m | 3.80 | 14.37 | 2.13 | 12.13 | >1000 | >1000 | 4.14 | 19.17 |
| 12 m | 5.84 | 23.44 | 5.06 | 21.63 | 3.66 | 15.19 | 4.53 | 21.85 |
| 12 m | 13.38 | 44.26 | 6.89 | 25.64 | 13.72 | 75.24 | 14.30 | 55.46 |
| 12 m | 7.44 | 24.84 | 6.79 | 18.56 | >1000 | >1000 | 8.65 | 25.90 |
| 12 m | 9.93 | 36.97 | 8.17 | 20.47 | 5.58 | 30.57 | 5.58 | 23.71 |
| 12 m | 5.92 | 39.13 | 9.53 | 107.00 | 7.31 | 68.60 | >1000 | >1000 |
| 12 m | 19.52 | 74.53 | 10.20 | 55.57 | 3.43 | 26.36 | 20.20 | 69.03 |
| 12 m | 4.21 | 18.07 | 3.36 | 12.18 | 251.58 | >1000 | 4.04 | 14.27 |
| 12 m | 5.72 | 32.60 | 5.33 | 26.49 | 24.32 | 308.10 | 7.04 | 39.93 |

TABLE 6
Antibody affinities and neutralization activities-
Clonal pairs isolated at 1.3 and 12 months

| | | Affinities | Neutralization activity | |
|---|---|---|---|---|
| | | K_{D} | IC50 | IC90 |
| | ID | (nM) | [ng/ml] | [ng/ml] |
| 1.3 m | C010 | 2.86E+01 | >1000 | >1000 |
| 12 m | C840 | 5.56E+00 | >1000 | >1000 |
| 1.3 m | C044 | 1.89E+02 | >1000 | >1000 |
| 12 m | C841 | 1.64E+00 | >1000 | >1000 |
| 1.3 m | C1010 | 6.25E+01 | >1000 | >1000 |
| 12 m | C1011 | 8.33E−02 | >1000 | >1000 |
| 1.3 m | C916 | 3.45E+00 | >1000 | >1000 |
| 12 m | C917 | 1.01E−01 | >1000 | >1000 |
| 1.3 m | C936 | 6.67E+02 | 10.13 | 66.57 |
| 12 m | C937 | 3.03E+00 | 13.44 | 78.15 |
| 1.3 m | C517 | 3.57E+01 | 11.31 | 49.51 |
| 12 m | C1002 | 1.96E−03 | 22.51 | 72.62 |
| 1.3 m | C933 | 4.17E+01 | 9.85 | 157.73 |
| 12 m | C934 | 1.00E+02 | 8.52 | 86.95 |
| 1.3 m | C129 | 1.89E+01 | 10.85 | 59.47 |
| 12 m | C1003 | 9.09E+01 | 2.40 | 19.43 |
| 1.3 m | C144 | 7.14E+02 | 2.86 | 40.53 |
| 12 m | C871 | 3.70E+00 | 13.15 | 32.24 |
| 1.3 m | C929 | 1.27E−01 | 7.81 | 42.17 |
| 12 m | C930 | 3.23E−01 | 12.25 | 49.59 |
| 1.3 m | C888 | 1.39E+03 | 85.84 | 469.41 |
| 12 m | C889 | 4.17E+00 | 6.07 | 70.12 |
| 1.3 m | C153 | 5.56E+03 | 70.71 | >1000 |
| 12 m | C881 | 5.26E+00 | 9.85 | 57.41 |
| 1.3 m | C032 | 3.11E+01 | 75.71 | >1000 |
| 12 m | C952 | 1.72E−01 | 7.66 | 32.20 |
| 1.3 m | C202 | n.d | 323.96 | >1000 |
| 12 m | C1027 | 1.14E−02 | 14.71 | 66.76 |
| 1.3 m | C006 | n.d. | 321.51 | >1000 |
| 12 m | C837 | 2.44E−01 | 8.61 | 48.75 |
| 1.3 m | C861 | n.d. | 489.37 | >1000 |
| 12 m | C853 | 5.88E+00 | 11.43 | 30.37 |
| 1.3 m | C1008 | 5.00E+02 | 697.10 | >1000 |
| 12 m | C1009 | 2.13E+00 | 5.23 | 34.85 |
| 1.3 m | C108 | 4.76E+01 | 480.69 | >1000 |
| 12 m | C951 | 3.03E+00 | 7.77 | 47.78 |
| 1.3 m | C953 | 1.64E+02 | >1000 | >1000 |
| 12 m | C954 | 7.14E+00 | 10.93 | 33.05 |
| 1.3 m | C038 | 7.14E+02 | >1000 | >1000 |
| 12 m | C960 | 6.67E+00 | 127.01 | >1000 |
| 1.3 m | C581 | 1.38E−02 | 31.57 | 351.60 |
| 12 m | C908 | 2.60E−03 | 89.77 | >1000 |

TABLE 7
Neutralization activity of mAbs against mutant SARS-CoV-2 pseudoviruses -
Clonal pairs isolated at 1.3 and 12 months

| | | wt | | R683G | | R346S | | K417N | | N440K | |
|---|---|---|---|---|---|---|---|---|---|---|---|
| | | IC50 | IC90 | IC50 | IC90 | IC50 | IC90 | IC50 | IC90 | IC50 | IC90 |
| | ID | [ngml] | [ng/ml] | [ngml] | [ng/ml] | [ngml] | [ng/ml] | [ngml] | [ng/ml] | [ngml] | [ng/ml] |
| 1.3 m | C936 | 12.4 | 97.3 | 4.7 | 52.5 | 10.8 | 101.3 | >1000 | >1000 | 12.1 | 89.9 |
| 12 m | C937 | 16.6 | 124.0 | 3.1 | 30.6 | 13.2 | 114.0 | 7.8 | 114.0 | 16.1 | 81.3 |
| 1.3 m | C517 | 10.5 | 52.7 | 3.3 | 19.5 | 7.9 | 52.1 | >1000 | >1000 | 8.7 | 50.9 |
| 12 m | C1002 | 23.3 | 81.2 | 2.6 | 22.6 | 19.2 | 77.4 | 8.4 | 69.8 | 19.5 | 74.5 |
| 1.3 m | C933 | 20.4 | 135.8 | 12.4 | 143.3 | 15.1 | 132.1 | 24.0 | 207.9 | 16.9 | 135.2 |
| 12 m | C934 | 11.1 | 76.9 | 4.6 | 58.1 | 10.7 | 78.5 | 9.1 | 64.0 | 8.9 | 61.1 |
| 1.3 m | C129 | 9.7 | 52.9 | 1.2 | 29.7 | 8.1 | 36.5 | 2.3 | 10.7 | 6.0 | 38.2 |
| 12 m | C1003 | 6.5 | 22.4 | 0.3 | 2.1 | 5.6 | 19.3 | 2.2 | 8.7 | 4.2 | 18.1 |
| 1.3 m | C144 | 3.7 | 15.9 | 1.2 | 6.7 | 3.4 | 16.7 | 1.8 | 11.5 | 2.4 | 13.5 |
| 12 m | C871 | 22.4 | 76.9 | 1.2 | 6.2 | 20.6 | 60.0 | 9.0 | 57.6 | 14.7 | 56.7 |
| 1.3 m | C929 | 11.8 | 60.5 | 3.3 | 18.2 | 8.8 | 52.2 | 10.2 | 70.5 | 8.2 | 49.2 |
| 12 m | C930 | 21.8 | 78.2 | 2.2 | 12.8 | 16.8 | 68.9 | 2.8 | 15.9 | 16.3 | 68.5 |
| 1.3 m | C888 | 88.1 | 401.0 | 41.6 | 251.2 | 79.5 | 324.0 | 47.3 | 286.6 | 69.3 | 293.0 |
| 12 m | C889 | 12.7 | 55.0 | 0.8 | 6.6 | 11.0 | 55.2 | 2.7 | 21.4 | 8.8 | 40.6 |
| 1.3 m | C153 | 95.4 | >1000 | 36.8 | 363.5 | 92.4 | 841.4 | 39.9 | 329.9 | 82.9 | 687.4 |
| 12 m | C881 | 20.1 | 48.8 | 0.4 | 2.6 | 15.0 | 50.9 | 6.2 | 26.2 | 12.6 | 56.6 |
| 1.3 m | C032 | 83.0 | 946.8 | 14.2 | 216.0 | >1000 | >1000 | 23.0 | 334.0 | >1000 | >1000 |
| 12 m | C952 | 11.9 | 60.2 | 0.5 | 2.8 | 7.1 | 33.0 | 5.7 | 29.1 | 4.3 | 20.6 |
| 1.3 m | C202 | 325.0 | >1000 | 210.2 | >1000 | 226.7 | >1000 | >1000 | >1000 | 234.5 | >1000 |
| 12 m | C1027 | 20.8 | 69.9 | 2.1 | 15.8 | 17.9 | 69.4 | 4.1 | 21.6 | 16.0 | 53.1 |
| 1.3 m | C006 | 480.6 | >1000 | 167.0 | >1000 | 231.4 | >1000 | 337.3 | >1000 | 289.2 | >1000 |
| 12 m | C837 | 16.2 | 59.8 | 0.3 | 2.1 | 12.2 | 63.3 | 3.0 | 28.5 | 9.5 | 58.2 |
| 1.3 m | C861 | 507.0 | >1000 | 226.9 | >1000 | 319.8 | >1000 | 166.0 | >1000 | 300.7 | >1000 |
| 12 m | C853 | 22.6 | 46.8 | 0.5 | 3.0 | 17.5 | 47.3 | 7.6 | 40.2 | 16.6 | 494.9 |
| 1.3 m | C1008 | 667.3 | >1000 | 524.3 | >1000 | >1000 | >1000 | >1000 | >1000 | 928.9 | >1000 |
| 12 m | C1009 | 8.8 | 35.1 | 2.3 | 13.5 | 7.2 | 32.2 | 2.8 | 13.8 | 5.7 | 32.6 |
| 1.3 m | C108 | 970.9 | >1000 | 217.3 | >1000 | >1000 | >1000 | 248.2 | >1000 | 741.1 | >1000 |
| 12 m | C951 | 14.6 | 75.7 | 2.1 | 16.8 | >1000 | >1000 | 5.8 | 33.2 | 12.9 | 58.2 |
| 1.3 m | C581 | 27.0 | 380.6 | 13.3 | 621.5 | >1000 | >1000 | 8.3 | 97.8 | 22.8 | 210.5 |
| 12 m | C908 | 74.9 | 464.1 | 11.1 | 265.3 | 65.4 | >1000 | 30.1 | 139.4 | 47.0 | 344.2 |

| | | | E484K | | | | | | K417N/E484K/N501Y | |
|---|---|---|---|---|---|---|---|---|---|---|
| | A475V | | (R683G) | | Q493R | | N501Y | | (R683G) | |
| | IC50 | IC90 | IC50 | IC90 | IC50 | IC90 | IC50 | IC90 | IC50 | IC90 |
| | [ngml] | [ng/ml] | [ngml] | [ng/ml] | [ngml] | [ng/ml] | [ngml] | [ng/ml] | [ngml] | [ng/ml] |
| 1.3 m | 151.6 | >1000 | 10.4 | 95.3 | 13.0 | 155.1 | >1000 | >1000 | >1000 | >1000 |
| 12 m | 7.5 | 43.3 | 6.8 | 59.9 | 15.6 | 144.9 | 103.2 | >1000 | >1000 | >1000 |
| 1.3 m | 7.4 | 38.3 | 5.2 | 29.7 | 8.5 | 55.1 | 9.0 | 60.5 | >1000 | >1000 |
| 12 m | 10.2 | 55.6 | 3.4 | 26.4 | 17.1 | 74.8 | 20.2 | 69.0 | 11.0 | 91.1 |
| 1.3 m | 27.9 | 267.5 | >1000 | >1000 | >1000 | >1000 | 54.1 | 335.7 | >1000 | >1000 |
| 12 m | 9.6 | 72.6 | >1000 | >1000 | 137.3 | >1000 | 17.1 | 140.7 | >1000 | >1000 |
| 1.3 m | 5.9 | 31.8 | >1000 | >1000 | 25.3 | 276.3 | 11.6 | 80.6 | >1000 | >1000 |
| 12 m | 3.4 | 12.2 | 251.6 | >1000 | 3.7 | 16.0 | 4.0 | 14.3 | 236.6 | >1000 |
| 1.3 m | 3.2 | 16.2 | >1000 | >1000 | >1000 | >1000 | 3.0 | 18.9 | >1000 | >1000 |
| 12 m | 8.7 | 45.0 | >1000 | >1000 | 5.9 | 32.6 | 14.2 | 56.0 | >1000 | >1000 |
| 1.3 m | 30.7 | 187.5 | 4.4 | 26.8 | 17.6 | 121.7 | 93.3 | 615.8 | 231.6 | 1000.0 |
| 12 m | 6.3 | 33.5 | 2.9 | 25.1 | 12.9 | 92.7 | 9.9 | 46.9 | 16.1 | 125.4 |
| 1.3 m | 85.7 | 787.8 | >1000 | >1000 | 109.1 | 574.7 | 88.2 | 360.7 | >1000 | >1000 |
| 12 m | 4.4 | 27.3 | 23.3 | 131.8 | 8.5 | 39.0 | 9.2 | 38.9 | 46.3 | 465.4 |
| 1.3 m | 454.3 | 1000.0 | >1000 | >1000 | 231.7 | >1000 | 125.0 | >1000 | >1000 | >1000 |
| 12 m | 4.6 | 28.8 | 1.1 | 7.2 | 15.4 | 63.4 | 14.4 | 63.7 | 0.6 | 3.2 |
| 1.3 m | 39.2 | 473.1 | 8.5 | 92.7 | 40.4 | 508.5 | 98.1 | >1000 | 14.3 | 170.6 |
| 12 m | 7.1 | 31.0 | 0.5 | 2.1 | 7.8 | 37.8 | 10.5 | 76.1 | 0.7 | 3.3 |
| 1.3 m | >1000 | >1000 | 636.0 | >1000 | >1000 | >1000 | >1000 | >1000 | >1000 | >1000 |
| 12 m | 5.1 | 22.0 | 3.4 | 19.3 | 10.3 | 69.8 | 16.8 | 55.3 | 2.0 | 10.0 |
| 1.3 m | >1000 | >1000 | 723.2 | >1000 | >1000 | >1000 | >1000 | >1000 | >1000 | >1000 |
| 12 m | 4.7 | 29.4 | 0.9 | 9.2 | 8.0 | 75.8 | 3.8 | 29.7 | 20.3 | 204.1 |
| 1.3 m | 124.8 | 891.2 | >1000 | >1000 | >1000 | >1000 | 568.6 | >1000 | >1000 | >1000 |
| 12 m | 12.3 | 49.5 | >1000 | >1000 | 14.9 | 53.2 | 14.1 | 55.1 | >1000 | >1000 |
| 1.3 m | 107.0 | >1000 | >1000 | >1000 | 661.1 | >1000 | 876.3 | >1000 | >1000 | >1000 |
| 12 m | 5.3 | 26.5 | 24.3 | 308.1 | 5.6 | 36.8 | 7.0 | 39.9 | 19.5 | 260.4 |
| 1.3 m | 684.5 | >1000 | 372.3 | >1000 | 485.6 | >1000 | >1000 | >1000 | 846.5 | >1000 |
| 12 m | 8.9 | 33.2 | 4.0 | 28.6 | 9.7 | 56.4 | 14.6 | 165.6 | 3.7 | 29.4 |
| 1.3 m | 21.6 | 208.0 | 70.8 | 958.4 | 26.0 | 506.3 | 34.0 | 472.0 | 21.4 | 227.4 |
| 12 m | 42.3 | 314.3 | 30.8 | 923.9 | 46.4 | 488.0 | 81.2 | 965.0 | 15.6 | 185.6 |

Lengthy table referenced here
US20240218057A1-20240704-T00001
Please refer to the end of the specification for access instructions.

### REFERENCES

[0330] 1 Davies, N. G. et al. Estimated transmissibility and impact of SARS-COV-2 lineage B.1.1.7 in England. Science 372, doi:10.1126/science.abg3055 (2021).
[0331] 2 Wang, Z. et al. mRNA vaccine-elicited antibodies to SARS-COV-2 and circulating variants. Nature 592, 616-622, doi: 10.1038/s41586-021-03324-6 (2021).
[0332] 3 Robbiani, D. F. et al. Convergent antibody responses to SARS-COV-2 in convalescent individuals. Nature 584, 437-442, doi: 10.1038/s41586-020-2456-9 (2020).
[0333] 4 Gaebler, C. et al. Evolution of antibody immunity to SARS-COV-2. Nature 591, 639-644, doi: 10.1038/s41586-021-03207-w (2021).
[0334] 5 Goel, R. R. et al. Distinct antibody and memory B cell responses in SARS-COV-2 naive and recovered individuals vaccination. Sci Immunol 6, doi: 10.1126/sciimmunol.abi6950 (2021).
[0335] 6 Saadat, S. et al. Binding and Neutralization Antibody Titers After a Single Vaccine Dose in Health Care Workers Previously Infected With SARS-COV-2. JAMA 325, 1467-1469, doi:10.1001/jama.2021.3341 (2021).
[0336] 7 Krammer, F. et al. Antibody Responses in Seropositive Persons after a Single Dose of SARS-COV-2 mRNA Vaccine. N Engl J Med 384, 1372-1374, doi: 10.1056/NEJMc2101667 (2021).
[0337] 8 Reynolds, C. J. et al. Prior SARS-COV-2 infection rescues B and T cell responses to variants after first vaccine dose. Science, doi: 10.1126/science.abh1282 (2021).
[0338] 9 Muecksch, F. et al. Development of potency, breadth and resilience to viral escape mutations in SARS-COV-2 neutralizing antibodies. bioRxiv, doi: 10.1101/2021.03.07.434227 (2021).
[0339] 10 Schmidt, F. et al. Measuring SARS-COV-2 neutralizing antibody activity using pseudotyped and chimeric viruses. J Exp Med 217, doi: 10.1084/jem.20201181 (2020).
[0340] 11 Tegally, H. et al. Detection of a SARS-COV-2 variant of concern in South Africa. Nature 592, 438-443, doi: 10.1038/s41586-021-03402-9 (2021).
[0341] 12 West, A. P. et al. Detection and characterization of the SARS-COV-2 lineage B.1.526 in New York. bioRxiv, 2021.2002.2014.431043, doi: 10.1101/2021.02.14.431043 (2021).
[0342] 13 Inoue, T. et al. Exit from germinal center to become quiescent memory B cells depends on metabolic reprograming and provision of a survival signal. J Exp Med 218, doi:10.1084/jem.20200866 (2021).
[0343] 14 Viant, C. et al. Antibody Affinity Shapes the Choice between Memory and Germinal Center B Cell Fates. Cell 183, 1298-1311 e1211, doi:10.1016/j.cell.2020.09.063 (2020).
[0344] 15 Stamatatos, L. et al. mRNA vaccination boosts cross-variant neutralizing antibodies elicited by SARS-COV-2 infection. Science, doi: 10.1126/science.abg9175 (2021).
[0345] 16 Sokal, A. et al. Maturation and persistence of the anti-SARS-COV-2 memory B cell response. Cell 184, 1201-1213 e1214, doi: 10.1016/j.cell.2021.01.050 (2021).
[0346] 17 Sakharkar, M. et al. Prolonged evolution of the human B cell response to SARS-COV-2 infection. Sci Immunol 6, doi: 10.1126/sciimmunol.abg6916 (2021).
[0347] 18 Brouwer, P. J. M. et al. Potent neutralizing antibodies from COVID-19 patients define multiple targets of vulnerability. Science 369, 643-650, doi: 10.1126/science.abc5902 (2020).
[0348] 19 Rogers, T. F. et al. Isolation of potent SARS-COV-2 neutralizing antibodies and protection from disease in a small animal model. Science 369, 956-963, doi: 10.1126/science.abc7520 (2020).
[0349] 20 Barnes, C. O. et al. SARS-COV-2 neutralizing antibody structures inform therapeutic strategies. Nature 588, 682-687, doi: 10.1038/s41586-020-2852-1 (2020).
[0350] 21 Hoffmann, M. et al. SARS-COV-2 Cell Entry Depends on ACE2 and TMPRSS2 and Is Blocked by a Clinically Proven Protease Inhibitor. Cell 181, 271-280 e278, doi:10.1016/j.cell.2020.02.052 (2020).
[0351] 22 Greaney, A. J. et al. Mutational escape from the polyclonal antibody response to SARS-CoV-2 infection is largely shaped by a single class of antibodies. bioRxiv, doi: 10.1101/2021.03.17.435863 (2021).
[0352] 23 Weisblum, Y. et al. Escape from neutralizing antibodies by SARS-COV-2 spike protein variants. Elife 9, doi: 10.7554/eLife.61312 (2020).
[0353] 24 Elsner, R. A. & Shlomchik, M. J. Germinal Center and Extrafollicular B Cell Responses in Vaccination, Immunity, and Autoimmunity. Immunity 53, 1136-1150, doi: 10.1016/j.immuni.2020.11.006 (2020).
[0354] 25 Lau, A. W. & Brink, R. Selection in the germinal center. Curr Opin Immunol 63, 29-34, doi: 10.1016/j.coi.2019.11.001 (2020).
[0355] 26 Victora, G. D. & Nussenzweig, M. C. Germinal centers. Annu Rev Immunol 30, 429-457, doi: 10.1146/annurev-immunol-020711-075032 (2012).
[0356] 27 Inoue, T., Moran, I., Shinnakasu, R., Phan, T. G. & Kurosaki, T. Generation of memory B cells and their reactivation. Immunol Rev 283, 138-149, doi: 10.1111/imr. 12640 (2018).
[0357] 28 Taylor, J. J., Pape, K. A., Steach, H. R. & Jenkins, M. K. Humoral immunity. Apoptosis and antigen affinity limit effector cell differentiation of a single naive B cell. Science 347, 784-787, doi: 10.1126/science.aaa1342 (2015).
[0358] 29 Mckean, D. et al. Generation of antibody diversity in the immune response of BALB/c mice to influenza virus hemagglutinin. Proc Natl Acad Sci USA 81, 3180-3184, doi: 10.1073/pnas.81.10.3180 (1984).
[0359] 30 Petersen, M. S. et al. SARS-COV-2 natural antibody response persists up to 12 months in a nationwide study from the Faroe Islands. medRxiv, 2021.2004.2019.21255720, doi: 10.1101/2021.04.19.21255720 (2021).
[0360] 31 Li, C. et al. Twelve-month specific IgG response to SARS-COV-2 receptor-binding domain among COVID-19 convalescent plasma donors in Wuhan. bioRxiv, 2021.2004.2005.437224, doi: 10.1101/2021.04.05.437224 (2021).
[0361] 32 Turner, J. et al. SARS-COV-2 mRNA vaccines induce a robust germinal centre reaction in humans. Research Square, doi:https://www.researchsquare.com/article/rs-310773/v1 (2021).
[0362] 33 Greaney, A. J. et al. The SARS-COV-2 mRNA-1273 vaccine elicits more RBD-focused neutralization, but with broader antibody binding within the RBD. bioRxiv, doi: 10.1101/2021.04.14.439844 (2021).
[0363] 34 Wang, Z. et al. Enhanced SARS-COV-2 neutralization by dimeric IgA. Sci Transl Med 13, doi:10.1126/scitranslmed.abf1555 (2021).
[0364] 35 Schoof, M. et al. An ultrapotent synthetic nanobody neutralizes SARS-COV-2 by stabilizing inactive Spike. Science 370, 1473-1479, doi: 10.1126/science.abe3255 (2020).
[0365] 36 De Gasparo, R. et al. Bispecific IgG neutralizes SARS-COV-2 variants and prevents escape in mice. Nature, doi: 10.1038/s41586-021-03461-y (2021).
[0366] 37 Xu, J. et al. Multimeric nanobodies from camelid engineered mice and llamas potently neutralize SARS-COV-2 variants. bioRxiv, doi: 10.1101/2021.03.04.433768 (2021).
[0367] 38 Wu, F. et al. A new coronavirus associated with human respiratory disease in China. Nature 579, 265-269, doi: 10.1038/s41586-020-2008-3 (2020).
[0368] 39 Chomczynski, P. & Sacchi, N. Single-step method of RNA isolation by acid guanidinium thiocyanate-phenol-chloroform extraction. Analytical biochemistry 162, 156-159, doi: 10.1006/abio. 1987.9999 (1987).
[0369] 40 DeAngelis, M. M., Wang, D. G. & Hawkins, T. L. Solid-phase reversible immobilization for the isolation of PCR products. Nucleic Acids Res 23, 4742-4743, doi:10.1093/nar/23.22.4742 (1995).
[0370] 41 Grifoni, A. et al. Targets of T Cell Responses to SARS-COV-2 Coronavirus in Humans with COVID-19 Disease and Unexposed Individuals. Cell 181, 1489-1501 e1415, doi:10.1016/j.cell.2020.05.015 (2020).
[0371] 42 Amanat, F. et al. A serological assay to detect SARS-COV-2 seroconversion in humans. Nat Med 26, 1033-1036, doi: 10.1038/s41591-020-0913-5 (2020).
[0372] 43 Barnes, C. O. et al. Structures of Human Antibodies Bound to SARS-COV-2 Spike Reveal Common Epitopes and Recurrent Features of Antibodies. Cell 182, 828-842 e816, doi:10.1016/j.cell.2020.06.025 (2020).
[0373] 44 Gupta, N. T. et al. Change-O: a toolkit for analyzing large-scale B cell immunoglobulin repertoire sequencing data. Bioinformatics (Oxford, England) 31, 3356-3358, doi: 10.1093/bioinformatics/btv359 (2015).
[0374] 45 Soto, C. et al. High frequency of shared clonotypes in human B cell receptor repertoires. Nature 566, 398-402, doi: 10.1038/s41586-019-0934-8 (2019).
[0375] 46 Guo, Y., Chen, K., Kwong, P. D., Shapiro, L. & Sheng, Z. cAb-Rep: A Database of Curated Antibody Repertoires for Exploring Antibody Diversity and Predicting Antibody Prevalence. Front Immunol 10, 2365, doi: 10.3389/fimmu.2019.02365 (2019).
[0376] 47 Kyte, J. & Doolittle, R. F. A simple method for displaying the hydropathic character of a protein. J Mol Biol 157, 105-132, doi: 10.1016/0022-2836(82)90515-0 (1982).
[0377] 48 Guy, H. R. Amino acid side-chain partition energies and distribution of residues in soluble proteins. Biophysical journal 47, 61-70, doi: 10.1016/S0006-3495(85)83877-7 (1985).
[0378] 49 DeWitt, W. S. et al. A Public Database of Memory and Naive B-Cell Receptor Sequences. PLOS One 11, e0160853, doi: 10.1371/journal.pone.0160853 (2016).
[0379] 50 Abascal, F., Zardoya, R. & Telford, M. J. TranslatorX: multiple alignment of nucleotide sequences guided by amino acid translations. Nucleic Acids Res 38, W7-13, doi: 10.1093/nar/gkq291 (2010).
[0380] 51 Lefranc, M. P. IMGT, the International ImMunoGeneTics Information System. Cold Spring Harb Protoc 2011, 595-603, doi: 10.1101/pdb.top115 (2011).
[0381] 52 DeWitt, W. S., 3rd, Mesin, L., Victora, G. D., Minin, V. N. & Matsen, F. A. t. Using Genotype Abundance to Improve Phylogenetic Inference. Mol Biol Evol 35, 1253-1265, doi:10.1093/molbev/msy020 (2018).

LENGTHY TABLES
The patent application contains a lengthy table section. A copy of the table is available in electronic form from the USPTO web site (https://seqdata.uspto.gov/?pageRequest=docDetail&DocID=US20240218057A1). An electronic copy of the table will also be available from the USPTO upon request and payment of the fee set forth in 37 CFR 1.19(b)(3).

The application's sequence listing, which the Patent Office published only in electronic form, follows.

SEQUENCE LISTING (12793 sequences)

SEQ ID NO: 1 - protein, 124 aa, Artificial Sequence
  Synthetic
QVQLVESGGGVVQPGRSLRLSCEASRFTFRSHAMHWVRQAPGKGLEWVAVIWYDGKNEYYADSVKGRFTISRDNSKKMVYLQMNNLRAEDTAVYYCAREGIAAPDSKADAFDIWGQGTMVTVSS

SEQ ID NO: 2 - protein, 110 aa, Artificial Sequence
  Synthetic
QSVLTQPPSASGTPGQRVTIPCSGGSSNIGSNTVHWYQQVPGTAPKLLVYGNNRRPAGVPDRFSGSRSGASASLAITGLQSEDEAVYYCATWDDSPNGPVFGGGTKLTVL

SEQ ID NO: 3 - protein, 126 aa, Artificial Sequence
  Synthetic
EVQLVESGGGLVQPGKSLRLSCTASGFTFEDYAMHWVRQAPGKGLEWVSGINWKSGSRGYADSAKGRFTISGNTAKNTLHLQMNSLRAEDTAFYYCAKAGVRNIAAAGPDLNFDFWGQGTLVTVSS

SEQ ID NO: 4 - protein, 103 aa, Artificial Sequence
  Synthetic
EIVLTQSPATLSLSPGERATLSCRASQSVGTYLAWYQHKLGQAPRLLIYDATKRATGIPARFSGSGSGTDFTLTISSLEPEDFAIYYCQQRITFGQGTRLEIK

SEQ ID NO: 5 - protein, 120 aa, Artificial Sequence
  Synthetic
QVQLQESGPGLVKPLDTLSLTCTVSGASISSYYWSWIRQPAGKGLEWIGLIYSSGSTTYNPSLKSRVTMSVDTSKKQFSLNLSSMTAADTAVYYCARGSALNWKSIGYFDSWGQGTLVTV

SEQ ID NO: 6 - protein, 107 aa, Artificial Sequence
  Synthetic
DIQMTQSPSSLSASIRDRVTITCQASQDISNYLNWYQQKAGEAPKLLIYDASSLETGVPSRFSGSGSGTEFTLTISSLQPEDIATYYCQQYDHVPLTFGGGTKVEIK

SEQ ID NO: 7 - protein, 123 aa, Artificial Sequence
  Synthetic
QVQLVESGGGVVQPGRSLRLSCEASGFTFTAYAMHWLRQAPGKGLEWVAVILNDGSNKLYADSVKGRFTVSRDNSKNMLYLQVNSLRVDDTAVYYCARDGSVDTLMVTWFDYWGQGTLVTVSS

SEQ ID NO: 8 - protein, 108 aa, Artificial Sequence
  Synthetic
DIQMTQSPSSLSASVGDRVTITCRASQSVNNYLNWYQQKPGQAPKLLIYAASSLQSGVPLRFSGSGSGTDFALTITSLHTEDFATYYCQQSYNTPPWTFGPGTKVEIK

SEQ ID NO: 9 - protein, 128 aa, Artificial Sequence
  Synthetic
EVQLVESGGGLVQPGGSLRLSCAASGFTFSIFSMNWVRQAPGKGLEWISYISSSSGSRHYADSVKGRFTISRDNAKNSLYLQMNNLRDEDTAMYYCAREAHDGALTGYGDYLNWFDPWGQGVLVTVSS

SEQ ID NO: 10 - protein, 110 aa, Artificial Sequence
  Synthetic
SYELTQPPSVSVAPGKTARIPCGGDSVGSKSVHWYQQKSGQAPVLVIHSDSDRPSGIPERFSGSNSGNTATLTITGVAAGDEADYYCHVWDTIGDRFYWVFGGGTKLTVL

SEQ ID NO: 11 - protein, 127 aa, Artificial Sequence
  Synthetic
QVQLVESGGGVVQPGRSLRLSCAASGFTFSTYAIHWVRQAPGKGLEWVAAISYDGSNKYYSDSVKGRLFISRDNSNNTVYLQMNNLRAEDTAIYYCARDGTIVTLVRGVMGPPFDYWGQGTLVTVSS

SEQ ID NO: 12 - protein, 107 aa, Artificial Sequence
  Synthetic
DIQMTQSPSSLSASVGDRVTITCQASQHISNYLNWYQQKPGKAPKLLIYDASNLETGVPSRFSGTGSGTDFAFTISSLQPEDIATYYCQQYDNLPPVFGPGTKVDIK

SEQ ID NO: 13 - protein, 127 aa, Artificial Sequence
  Synthetic
QVQLVESGGGVVQPGRSLRLSCAASGFTFSRYAMHWVRQAPGKGLEWVAVISYDGSNKYYATSLKGRCTISRDNSKNTLYLQMNSLRAEDTAVYFCAKQIGEYCSGGNCYQGSLDYWGQGTLVTVSS

SEQ ID NO: 14 - protein, 107 aa, Artificial Sequence
  Synthetic
DIQMTQSPSSLSASVGDRVTITCQASQDISNYLNWYQQKPGKAPKLLIYDASDLETGVPSTFSGSGSGTDFTLTISSLQPEDFATYYCQQYDIVPFTFGPGTKVDIK

SEQ ID NO: 15 - protein, 127 aa, Artificial Sequence
  Synthetic
EVQLVESGGGLVKPGGSLRLSCVATGFSFSDAWMNWVRQAPGKGLEWVGRIRSEIADGTTDYAAPVKGRFTISRDDARNTLYLQMNSLEIEDTAVYYCTTGVVVVVSSSPDDAFDVWGQGTMVTVSS

SEQ ID NO: 16 - protein, 107 aa, Artificial Sequence
  Synthetic
DIQMTQSPSSLSASVGDRVTITCRASQSIGHYLNWYQQKPGKAPKLLIYAASSLQSGVPSRFSGSGSGAGFTLTVNGLQPEDLATYYCQQYYTTPPTFGQGTKVEIK

SEQ ID NO: 17 - protein, 124 aa, Artificial Sequence
  Synthetic
QVQLQESGPGLVKPSQTLSLTCTVSGASISSGEYYWSWVRQPPGKGLEWVGYIYYSGSTYYNPSLKSRVTISVDTSKNHFSLKLKSLTAADTAVYFCATGGLSAFGELFPHDKWGQGTLVTVSS

SEQ ID NO: 18 - protein, 107 aa, Artificial Sequence
  Synthetic
EIVLTQSPATLSLSPGERATLSCRASQSVGSDLAWYQQKPGQAPRLLIYDTSNRATGIPARFSGSGSGTDFTLTISSLDPADFAVYYCQQRTNWLFSFGPGTKVDIK

SEQ ID NO: 19 - protein, 120 aa, Artificial Sequence
  Synthetic
QVQLVESGGGVFQPGRSLRLSCAASGFNFRTYAMHWVRQAPGKGLEWVAVILDDGSGKFYADSVKGRFTVSRDNSKHTLYLQMTSLSAEDTAIYFCARDQGTATTYFDHWGQGTLVTVSS

SEQ ID NO: 20 - protein, 108 aa, Artificial Sequence
  Synthetic
DIQMTQSPSSLSASVGDRVTITCRASQSIRTFLSWYQQKAGKAPKLLIYTASSLQNGVPSRFSGSGSGTDFTLTISSLQPEDFATYYCQQSYETPPWTFGQGTKVEIK

SEQ ID NO: 21 - protein, 120 aa, Artificial Sequence
  Synthetic
QVQLVESGGGVVQPGGSLRLSCGASGFTFSSYAMHWVRQAPGEGLEWVAVILYDGAGKFYADSVKGRFTISRDNSKNTLYLQMNSLRAEDTAVYYCARDYGDYVTHFDYWGQGALVTVSS

SEQ ID NO: 22 - protein, 108 aa, Artificial Sequence
  Synthetic
DIQMTQSPSSLSASVGDRVTITCRASQSISSYLNWYQQKPGKAPKLLIYTASSLQSGVPSRFSGSGSGTDFTLTITSLQPEDFATYYCQQSYNTPPWTFGQGTKVEIK

SEQ ID NO: 23 - protein, 121 aa, Artificial Sequence
  Synthetic
QVQLQESGPGLVKPSQTLSLTCTVSGGSISSGDYYWSWIRQPPGKGLEWIGYIYYTGITYYRPSLKSRVTISVDTSKNQFSLKLSSVTAADTAVFYCARVVRLWPRYFDSWGQGTLVTVSS

SEQ ID NO: 24 - protein, 110 aa, Artificial Sequence
  Synthetic
QSALTQPPSASGSPGQSVTISCTGTSSDVGTYDYVSWYQQHPGKAPKVIIYEVTKRPSGVPDRFSGSKSGNTASLTVSGLQAEDEAHYYCSTYAGSDNLEFGGGTKLTVL

SEQ ID NO: 25 - protein, 123 aa, Artificial Sequence
  Synthetic
QVQLVQSGAEVKKPGASVKVSCRASGYTFTDHYIHWVRQAPGQGLEWMGWINPNSGDTNYPQKFQGRVTMARDTSISTAHMELRRLKSDDTAVYYCARTSSPHSSSTGDFDSWGQGTLVTVSS

SEQ ID NO: 26 - protein, 110 aa, Artificial Sequence
  Synthetic
SYELTQPPSVSVAPGKTARITCGGDDIGSKSVHWYQQKSGQAPVLVIHDDSDRPSGIPERFSGSNSGNTATLTISRVEAGDEADYYCQVWDFTGDHPGWVFGGGTKLTVL

SEQ ID NO: 27 - protein, 128 aa, Artificial Sequence
  Synthetic
QVQLQESGPGLVKPSETLSLICSVSGVSVSSRNFFWSWIRQPPGKGLEWIGYMSYGGNTNYNPSLKSRVTISIDTSKNQFSLKLSSVTAADTAVYYCARETYYYDRSGYYSSDGFDYWGQGILVTVSS

SEQ ID NO: 28 - protein, 108 aa, Artificial Sequence
  Synthetic
EIVLTQSPGTLSLSPGERATLSCRASQSITSSSLAWYQQKRGQPPRLLIYGASSRATGIPDRFSGSGSGTDLTLTISRLEPEDFAVYYCQQYGNSPYTFGQGTKLEIK

SEQ ID NO: 29 - protein, 125 aa, Artificial Sequence
  Synthetic
QLQLQESGPGLVKTSETLSLTCTVSGGSISSGNSYWGWIRQPPGKGLEWIGDIYYSGSTFYNPSLKSRLTISVDTSKNQFSLKLTSVTAADTAVYYCARRGGRTPVRFNYGGDVWGQGTTVTVSS

SEQ ID NO: 30 - protein, 106 aa, Artificial Sequence
  Synthetic
DIQMTQSPSSLSASVGDRVTITCQASQDISRYLNWFQHKPGKAPKLLIYDASNLEAGVPSRFTGSGSGTEFTFTISSLQPEDFAIYFCQQYDSLPLTFGGGTKVEI

SEQ ID NO: 31 - protein, 121 aa, Artificial Sequence
  Synthetic
QVQLVQSGAEVKKPGASVKVSCKASGYIFTGFYMHWVRQAPGQGPEWMGWINPNSGGTNYAQKFQGRVTMTRDTSISTAYMELSRLRSDDTALYYCARGGQDELTGTFDVWGQGTMVTVSS

SEQ ID NO: 32 - protein, 105 aa, Artificial Sequence
  Synthetic
SYELTQPPSVSLAPGKTASITCGGDSIGSKSVHWYQQRPGQAPILVIYYDGDRPSGIPERFSGSNSGNTATLTISRVEAGDEADYYCQVWDGGWVFGGGTKLTVL

SEQ ID NO: 33 - protein, 121 aa, Artificial Sequence
  Synthetic
QVQLQESGPGLVKASQTLSLTCTVSGGSFRSGGYYYNWIRQHPGKGLEWIGYIFYTGVTYYNPSLKSRVSISVDTSKNQLSLNLTSVTAADTAVYYCARGSYSDYNGGWDYWGRGTLVTVS

SEQ ID NO: 34 - protein, 109 aa, Artificial Sequence
  Synthetic
QSALTQPPSASGSPGQSVTISCIGTSSDVGGYNYVSWYQHHPGKAPKLIIYEVSKRPSGVPDRFSGSKSGNTASLTVSGLQADDEADYYCSSYAGSNNWVFGGGTKLTV

SEQ ID NO: 35 - protein, 118 aa, Artificial Sequence
  Synthetic
EVQLVESGGGLIQPGGSLRLSCAASGITVSSNYMNWVRQAPGKGLEWVSVLYAGGSTFYADSVKGRFTISRDDSKNTLYLQMDSLRAEDTAVYYCARDLSSSGGFDYWGQGTLVTVSS

SEQ ID NO: 36 - protein, 107 aa, Artificial Sequence
  Synthetic
EIVLTQSPGTLSLSPGERATLSCRASQSVSSSYLAWYQQKPGQAPRLLIYGASSRATGIPDRFSGRGSGTDFTLTISRLEPEDFAVYYCQQYGSLYTFGQGTKLEIK

SEQ ID NO: 37 - protein, 127 aa, Artificial Sequence
  Synthetic
QVQLVESGGGVVQPGRSLRLSCAASGFAFSTYGMHWVRQTPGKGLAWVAAISYDGRNTYYGDSVKGRFTITRDNSKNTLYLQLNSLRDEDTALYYCARDATMITLVRGIMGPPFDHWGQGSLVTVSS

SEQ ID NO: 38 - protein, 106 aa, Artificial Sequence
  Synthetic
DIQMTQSPSSLSASVGDRVTISCQASQGISNYLNWYQQKPGKAPKLLIHDASILETGVPSRFSGSGSGTDFTFTISSLQPEDIATYYCQQYDNFPPDFGPGTKVDI

SEQ ID NO: 39 - protein, 127 aa, Artificial Sequence
  Synthetic
QVQLVESGGGVVQPGRSLRLSCAASGFTFSSYGMHWVRQAPGKGLEWVAVISYDGSNKYYADSVKGRFTISRDNSKNTLYLQMSSLRAEDTAVYYCAKQIGEYCSGGSCYQGSLDYWGQGTLVTVSS

SEQ ID NO: 40 - protein, 107 aa, Artificial Sequence
  Synthetic
DIQMTQSPSSLSASVGDRVTITCQASQDISNYLHWYQQKPGKAPKLLIYDASNLETGVPSRFSGSGSGTDFTFTISSLQPEDIATYYCQQYDNLPFTFGPGTKVDIK

SEQ ID NO: 41 - protein, 124 aa, Artificial Sequence
  Synthetic
QVQLQESGPGLVKPSQTLSLTCTVSGGSISSGGYYWSWIRQHPGKGLEWIGYIYYSGSTYYNPSLESRVTISVDTSKNQFSLKLSSVTAADTAVYYCASGELSAFGELFPHDYWGQGTLVTVSS

SEQ ID NO: 42 - protein, 107 aa, Artificial Sequence
  Synthetic
EIVLTQSPATLSLSPGERATLSCRASQSVSTYLAWYQQKPGQAPRLLIYDASNRATGIPARFSGSGSGTDFTLTISSLEPEDFAVYYCQQRSNWLFTFGPGTKVDIK

SEQ ID NO: 43 - protein, 120 aa, Artificial Sequence
  Synthetic
QVQLVESGGGVVQPGRSLRLSCAASGFTFSSYAMHWVRQAPGKGLEWVAVILYDGSNKYYADSVKGRFTISRDNSKNTLYLQMNSLRAEDTAVYYCARDQGMATTYFDYWGQGTLVTVSS

SEQ ID NO: 44 - protein, 108 aa, Artificial Sequence
  Synthetic
DIQMTQSPSSLSASVGDRVTITCRASQSISSYLNWYQQKPGKAPKLLIYAASSLQSGVPSRFSGSGSGTDFTLTISSLQPEDFATYFCQQSYNTPPWTFGQGTKVEIK

SEQ ID NO: 45 - protein, 122 aa, Artificial Sequence
  Synthetic
QVQLVQSGAELKKPGASVRVSCKASGYTFTDYYIHWVRQAPGQGFEWMGWINPDSGGTNYPQNFQGRVTMTRGTSISTAYVELTRLRFDDTAVYYCARTSSPHSSSTGDLDYWGQGTLVTVS

SEQ ID NO: 46 - protein, 110 aa, Artificial Sequence
  Synthetic
SYELTQSPSVSVAPGKTARITCGGRDIGSKSVHWYQQRPGQAPVLVISYDNDRPSGIPERFSGSNSGNTATLTISRVEAGDEADYYCQVWDGTGDHPGWVFGGGTRLTVL

SEQ ID NO: 47 - protein, 121 aa, Artificial Sequence
  Synthetic
QVQLVQSGAEVKKPGASVKVSCKASGYTFTGYYMHWVRQAPGQGLEWMGWINPNSGGTNYAQKFQGRVTMTRDTSISTAYMELSRLTSDDTAVYYCARGGQDELTGAFDIWGQGTMVTVSS

SEQ ID NO: 48 - protein, 105 aa, Artificial Sequence
  Synthetic
SYELTQPPSVSVAPGKTARITCGGNSIGSKSVHWYQQKPGQAPVLVIYYDSDRPSGIPERFSGSNSGNTATLTISRVEAGDEADFHCQVWDSGWVFGGGTKLTVL

SEQ ID NO: 49 - protein, 122 aa, Artificial Sequence
  Synthetic
QVQLQESGPGLVKPSQTLSLTCTVSGGSISSGGYYWGWIRQHPGKGLEWIGYIYYSGSTYYNPSLKSRVTISVDTSKNQFSLKLSSVTAADTAVYYCARGSYSNYNGGLDYWGQGTLVTVSS

SEQ ID NO: 50 - protein, 110 aa, Artificial Sequence
  Synthetic
QSALTQPPSASGSPGQSVTISCTGTSSDVGGYNYVSWYQQHPGKAPKLMIYEVSKRPSGVPDRFSGSKSGNTASLTVSGLQAEDEADYYCSSYAGSNNWVFGGGTKLTVL

SEQ ID NO: 51 - protein, 124 aa, Artificial Sequence
  Synthetic
QVQLQESGPGLVKPSQTLSLTCTVSGASISSSEHYWSWIRQPPGKGLEWIGYISYSGGTYQNPSLQSRMTLSMDASKNQFSLKLSSVTAADTAVYFCARLNTMIVMINGVFDVWGQGTMVTVSS

SEQ ID NO: 52 - protein, 108 aa, Artificial Sequence
  Synthetic
DIQMTQSPSSLSAFVGDRVTITCQASQDINKYVNWYQQKPGKAPKLLIYDASNLQTGVPSRFSGSGSGTHFTFTISSLQPEDFATYYCQEYDNLFSISFGQGTRLEIK

SEQ ID NO: 53 - protein, 123 aa, Artificial Sequence
  Synthetic
EVQLLESGGGLVRPGGSLRLSCAASGFIFGSYAMTWVRQAPGKGLEWVSTISGGGTSTDYADSVKGHFTISRDNGKNTLYLQMNSLRAEDTAVYYCVKESDYYMASVNGMDVWGHGTTVTVSS

SEQ ID NO: 54 - protein, 108 aa, Artificial Sequence
  Synthetic
EIVLTQSPGTLSLSPGERATLSCRARQGVSSTYLAWYQQKPGQAPRLLIYGASSRATGIPDRFSGSGSGADFTLTISRLEPEDFAVYYCQQYGTSPYTFGQGTKLEIK

SEQ ID NO: 55 - protein, 123 aa, Artificial Sequence
  Synthetic
QVQLVQSGPEVKKPGTSVKVSCKAFQLSFSVSAVQWVRQARGQRLEWIGWIVVGSGNTNYAQKFQERVTITRDMSTSTVYMEVRSLRSEDTAVYYCAAPQCNRTTCYDAFDMWGQGTMVTVSS

SEQ ID NO: 56 - protein, 108 aa, Artificial Sequence
  Synthetic
EIVLTQSPGTLSLSPGERATLSCRASQSVNSNYLAWYQQKPGQAPRLLIFGPSNRATGIPDRFSGSGSGTDFTLTISRLESEDFAVYYCQQYGSSPWTFGQGTKVEIK

SEQ ID NO: 57 - protein, 120 aa, Artificial Sequence
  Synthetic
EVQLLESGGGLVQPGGSLRLSCVASRFIFSRYALSWVRQAPGKGLEWVSGISGSGHSTHYADSVTGRFTISRDNSKNTVYLQMSSLRAEDTAVYYCAKGPRSNYDYFESWGQGTLVTVSS

SEQ ID NO: 58 - protein, 107 aa, Artificial Sequence
  Synthetic
DIQLTQSPSSLSASVGDRVTITCRASQGISSALAWYQQRPGKAPRLLIYDASSLDSGVPSRFSGSGSGTDFTLTISSLQSEDFATYYCQQFINNPLTFGGGTKVEIK

SEQ ID NO: 59 - protein, 120 aa, Artificial Sequence
  Synthetic
EVQLVESGGGLVQPGRSLRLSCVASGFEFEDYGMHWVRQVPGKGLEWVSGISWNSASVGYADSVRGRFTISRDNAKNSLYLQMNSLRAEDTALYYCGKQINEWSHFLDYWGQGTLVTVSS

SEQ ID NO: 60 - protein, 107 aa, Artificial Sequence
  Synthetic
DIQLTQSPSSVSASVGDRVTITCRASQGISNWLAWYQKKPGKAPKLLIYATSSLQSGVPSRFSGSGSETDFTLTIRSLQPEDFATYYCQQANSYPLTFGQGTKLEIK

SEQ ID NO: 61 - protein, 121 aa, Artificial Sequence
  Synthetic
QVQLQESGPGLVKSSETLSLTCTVSSGSVRSGGYYWSWIRHHPGKGLEWIGYIFYTGITYYNPSLKSRVIVSVDPSKNQFSLNLTSVTAADTAVYYCASTPYTNGGAFHIWGQGTMVTVSS

SEQ ID NO: 62 - protein, 110 aa, Artificial Sequence
  Synthetic
QSALTQPPSASGSPGQSVTISCTGTSSDVGGHNYVSWYQQFPGKAPKLIIYDVNKRPSGVPDRFSGSKSANTASLTVSGLQAEDEADYHCSSYAGSNNWVFGGGTKLTVL

SEQ ID NO: 63 - protein, 128 aa, Artificial Sequence
  Synthetic
QVQLQESGPRLVKPSETLSLTCIVSGGSVSSNNFYWSWIRQPPGKRLEWIGYFYNSGSSKYNPSLKSRVTISGDTSKNQFSLKLSSVTAADTAVYYCARETFFYDRTGHYKSDGFDVWGQGTMVTVSS

SEQ ID NO: 64 - protein, 107 aa, Artificial Sequence
  Synthetic
DIQMTQSPSTLSASVGDRVTISCRASQNISSWLAWYQQEAGKAPKLLIYKASSLESGVPSRFSGSGSGTEFTLTISSLQPGDFATYYCQQYNIYSYTFGQGTKLEIK

SEQ ID NO: 65 - protein, 120 aa, Artificial Sequence
  Synthetic
QVQLVESGGGVVQPGTSLRLSCAASGFTFSSFGMNWVRQAPGKGLEWVAVIFFDGSKTYYADSVKGRFTISRDNSKNTLYLQMNSLRTEDTAVYYCAKGQLRLGEFDDYWGQGTLVTVSS

SEQ ID NO: 66 - protein, 107 aa, Artificial Sequence
  Synthetic
DIQMTQSPSSLSASVGDRVTITCRASQDIRDDLNWYQHKPGKAPKLLIYTASSLQSGVPSRFSGSGSGTDFTLTISRLQPEDFASYYCLQDHNYPLTFGQGTKLEIK

SEQ ID NO: 67 - protein, 120 aa, Artificial Sequence
  Synthetic
EVQLVESGGGLVQPGKSLRLSCAGSGFAFSSYHMNWVRQAPGKGLEWVAYISSGSSTIHYADSVKGRFTISRDNAKNSFYLQMNSLRAEDTALYYCARAIVGTKGYMDVWGKGTTVTVSS

SEQ ID NO: 68 - protein, 109 aa, Artificial Sequence
  Synthetic
QSALTQPASVSGSPGQSVTISCTGTRSDVGSYDLVSWYQLHADKAPKLIIYEVTSRPSGISTRFSGSKSGNTASLTISGLQAEDEADYYCCSYAGTTWLFGGGTRLTVL

SEQ ID NO: 69 - protein, 125 aa, Artificial Sequence
  Synthetic
QVQLVESGGGLVKPGGSLRLSCAASGFTFSDYCVTWIRQAPGKGLEWLSYSNTNDSSRSYADSVKGRFTISRDNAKNSLYLQMDSLRAEDTAVYYCARRGDGNVPLFHYYYMDVWGKGTTVTVSS

SEQ ID NO: 70 - protein, 110 aa, Artificial Sequence
  Synthetic
QSVLTQPPSASGTAGQRVTISCSGGSSNIGSNTVHWYQQLPGTAPKLLIYSNYKRPSGVPDRFSGSKSGASASLAISGLQSEDEAEYYCAAWDDSANGPIFGGGTKLTVL

SEQ ID NO: 71 - protein, 131 aa, Artificial Sequence
  Synthetic
EVQLVESGGGLIQTGGSLKLSCAASGFIVTNNYMSWVRQAPGKGLEWVSVIYSGGTTYYADSVKGRFTISRDISKNTLYLQMNSLKAEDTAVYYCAREGDVEGISDSWSGYSRDRYYFDHWGQGTLVTVSS

SEQ ID NO: 72 - protein, 110 aa, Artificial Sequence
  Synthetic
QSALTQPASVSGSPGQSITISCTGTSSDVGGYNYVSWYQQHPGKAPKLMIYDVSNRPPTISNRFSGSKSGNTASLIISGLQPEDEADYYCSSFTSNNTRVFGTGTKVTVL

SEQ ID NO: 73 - protein, 131 aa, Artificial Sequence
  Synthetic
EVQLVESGGGLIQPGGSLRLSCAASGFIVSNNYISWVRQAPGKGLEWVSVIYSGGTTYYADSVKGRFSISRDTSKNTVYLQINNLRAEDTAVYYCAREGDVDGNYGFWSGYSRDRYYFDYWGQGTLVTVSS

SEQ ID NO: 74 - protein, 110 aa, Artificial Sequence
  Synthetic
QSALTQPASVSGSPGQSITISCTGTSSDVGAYNYVAWYQQHPGKAPKLMVYDVSKRPSGVSNRFSGSKSGNTASLTISGLQTEDEGDYYCCSYTTNTTRVFGTGTMLTVL

SEQ ID NO: 75 - protein, 130 aa, Artificial Sequence
  Synthetic
QVQLVQSGPEVKKPGASVKVSCKASGYIFTDYSIHWVRQAPGQGLEWMGWINPNSGGGNSAQIFKGRATMARDTSITTVYMDLSGLRSDDTAVYYCARGPLFHKVVYESSSGFHDGLDFWGQGTMVTVSS

SEQ ID NO: 76 - protein, 109 aa, Artificial Sequence
  Synthetic
QSALTQPASVSGSPGQSVTISCTGTSSDVGGYNFLSWYQQHPGKAPKLLLYEVINRPSGVSDRFSGSKSGNTASLTISGLQAEDEADYYCNSYTSNFTWVFGGGTHLTV

SEQ ID NO: 77 - protein, 130 aa, Artificial Sequence; identical to SEQ ID NO: 75
  Synthetic

SEQ ID NO: 78 - protein, 111 aa, Artificial Sequence
  Synthetic
NFMLTQPHSVSESPGKTVTISCTGSSGSIASNYVQWYQQRPGSAPTTVIYEDNQRPSGVPDRFSGSIDSSSNSASLTISGLKTEDEADYYCQSYDSSNYWVFGGGTKLTVL

SEQ ID NO: 79 - protein, 125 aa, Artificial Sequence
  Synthetic
QVQLVQSGAEVKQPGASVKISCKASGYIFTTYFMHWVRQAPGQGLEWLGIIDPTISGASLAQKFQGRVTMTSDTSTSTVYMEMRSLRSDDTALYFCARASTSTSSWSEALSLGSWGQGTLVTVSS

SEQ ID NO: 80 - protein, 113 aa, Artificial Sequence
  Synthetic
QSVLTQPPSVSGAPGQGVSISCTGSSSNVGAGYGVHWYQQLPGTTPKLLIYDNNSRPAGVPDRFSGSKSGTSASLAIAGLQPEDEADYYCQSWDNGLSGSGVVFGGGTKVTVL

SEQ ID NO: 81 - protein, 117 aa, Artificial Sequence
  Synthetic
EVQLVESGGGLIQPGGSLRLSCAASEFVISRNYMSWVRQAPKKGLEWVSVLYSGGSTFYADSVKGRFTISRDDSRNMLYLQMNSLRAEDTAVYYCVRDFGEFYFDYWGQGVLVTVSS

SEQ ID NO: 82 - protein, 107 aa, Artificial Sequence
  Synthetic
EIVMTQSPTTLSVSPGERATLSCRASQSLSSNLAWYQQKPGQAPRLLIFGVSTRATGIPARFSGSGSGTEFTLTISSLQSEDFAVYYCQQYYSGPRTFGQGTKVEIK

SEQ ID NO: 83 - protein, 117 aa, Artificial Sequence
  Synthetic
EVQLVESGGGLIPPGGSLRLSCAASGIIVSRNYMSWVRQTPGKGLEWVSVMYAGGTKEYADSVKGRFIISRDDSNNTLYLQMNSLRAEDTAVYYCARDLIVLGVDVWGQGTTVTVSS

SEQ ID NO: 84 - protein, 108 aa, Artificial Sequence
  Synthetic
DIQLTQSPSFLSASVGDRVTITCRASQGISNYLAWYQQKPGKAPKLLIYAASTLQSGVPSRFSGSGSGTEFTLTISSLQPEDFATYYCQLLNSYPMCSFGQGTKLEIK

SEQ ID NO: 85 - protein, 122 aa, Artificial Sequence
  Synthetic
EVQLVESGGGLVQPGGSLRLSCSVSGFTFSNFAMHWVRQAPGKGLEFVSGVSSDGDITDYADSVKGRFTISRDNSKNTLYLQMSSLRPEDTAVYYCVKDKEHSTMVTIFDFWGQGTLVTVSS

SEQ ID NO: 86 - protein, 107 aa, Artificial Sequence
  Synthetic
DIQMTQSPSSLSASVGDRVTITCRASQSISSFLNWYQQKPGKAPKLLIYAASSLQSGVPSRFSGRGSGADFTLTITSLQPEDFATYFCQQSYSSHLTFGPGTKVDIK

SEQ ID NO: 87 - protein, 121 aa, Artificial Sequence
  Synthetic
QVQLQESGPGLVKPSQTLSLTCGVSGDSISSGGHFWSWVRQHPGTGLEWIAYSPFSGTTYYNPSLKSRVTLSVDTSKNQFFLSLTSVTDADTAVYFCARVKGWLRGYFDHWGQGVLVTVSS

SEQ ID NO: 88 - protein, 110 aa, Artificial Sequence
  Synthetic
NFMLTQPHSVSESPGKTVTISCTASSGNIVNNYVQWYQQRPGSAPIIVIYEDAQRPSGVPDRFSGSIDTSSNSASLTISGLKTEDEADYYCQSYEIDSHVVFGGGTRLTV

SEQ ID NO: 89 - protein, 118 aa, Artificial Sequence
  Synthetic
QVQLQQWGAGLLKPSETLSLTCAVYGGSFSDYYWSWIRQPPGKGLEWIGENNHSGKTNYNPSLENRVTISVDTSKNQFSLKLTSVTAADTAVYYCARESGSYGTFDYWGQGTLVTVSS

SEQ ID NO: 90 - protein, 108 aa, Artificial Sequence
  Synthetic
EIVLTQSPGTLSLSPGERATLSCRASQSVSSAYLAWYQQKPGQAPRLLIYGASSRATGIPDRFSGSGSGTDFTLTISRLEPEDFAVYFCQQYAYTIWTFGQGTKVEIK

SEQ ID NO: 91 - protein, 121 aa, Artificial Sequence
  Synthetic
EVQLVESGGGLIQPGGSLRLSCAVSGVAVSTNYMSWVRQAPGQGLEWVSTIYSGDTTYYSDSVKGRFTISRDNSKNTFYLQMNSLRVPDTAVYYCARLGGVFNGFNGSFDYWGQGTLVTVS

SEQ ID NO: 92 - protein, 110 aa, Artificial Sequence
  Synthetic
QSALTQPASVSGSPGQSITISCIGTSSDFENYNLVSWYQQHPGKAPKVMIYEDTKRPSGVSNRFSGSKSANTASLTISGLQAEDEAEYYCCSYAGASTWVFGGGTRVTVV

SEQ ID NO: 93 - protein, 120 aa, Artificial Sequence
  Synthetic
QVQLVESGGGVVQPGRSLRLSCAASGFTFIRYNMHWVRQAPGKGLEWVAVIWYDGSNKYYADSVKGRFTISRDNSKNTLYLQMNSLRAEDTAVYYCARDPMIVVVEMDYWGQGTLVTVSS

SEQ ID NO: 94 - protein, 112 aa, Artificial Sequence
  Synthetic
DVVMTQSPLSLPVTLGQPASISCNSSQSLVHTDGNTYLNWFQQRPGQSPRRLIYKVSNRDSGVPDRFSGSGSDTDFTLQISRVEADDVGVYYCMQGSHWPYTFGQGTKLEIK

SEQ ID NO: 95 - protein, 118 aa, Artificial Sequence
  Synthetic
QVQLQQWGAGLLKPSETLSLTCVVYGGSFSAYYWSWIRQPPGKGLEWIGEINHSGSTNYKSSLQSRVTISVDTSKNQFSLKLSSVTAADTAVYYCARETGTYGTFDHWGQGTLVTVSS

SEQ ID NO: 96 - protein, 107 aa, Artificial Sequence
  Synthetic
EIVLTQSPGTLSLSPGERATLSCRASQSVSSTYLAWYQQKPGQAPRLLIYGASSRATGIPDRFSGSGSGTDFTLTISRLEPEDFAVYYCQQYAFSVWTFGQGTKVEI

SEQ ID NO: 97 - protein, 121 aa, Artificial Sequence
  Synthetic
QVQLQESGPGLVKPSQTLSLTCAVSGDSIRSGGYYWSWVRQHPGRGLEWIGYIYFSGTTYYNPSLKSRVTISVDTSEKQFSLKLTSVTDADTAVYFCARVKGWLRGYFDYWGQGALVTVSS

SEQ ID NO: 98 - protein, 110 aa, Artificial Sequence
  Synthetic
NFMLTQSHSVSESPGKTVTISCTGSSGNIVNNYVQWYQQRPGSAPIIVIYEDTQRPSGVPDRFSGSIDTSSNSASLTISGLKTEDEADYYCQSYDSGSHVVFGGGTKLTV

SEQ ID NO: 99 - protein, 122 aa, Artificial Sequence
  Synthetic
EVQLVESGGDLVQPGGSLRLSCAASGFSVTTNAMAWVRQAPGKGLEWISYINIGSANIQYADSVKGRFTISRDNAKNSLYLQMNSLRDEDTAVYYCARGDCTSSSCYSLDYWGQGALVTVSS

SEQ ID NO: 100 - protein, 107 aa, Artificial Sequence
  Synthetic
DIQMTQSPSSLSASVGDRVSITCRASQTINTHLSWYLQKPGEAPRLLVYAASTLHSGVPSRFSGSGSGTDFTLTISSLQPEDFATFYCQQTYRFPLTFGGGTKVEIK

SEQ ID NO: 101 - protein, 122 aa, Artificial Sequence
  Synthetic
EVQLVESGGDLVQPGGSLRLSCAASGFTFTTYSMSWVRQAPGKGLEWISYINSGSANIHYADSVKGRFTVSRDNAKNSLYLQMNSLRDEDTAVYYCARGDCLSSSCYSLDYWGQGALVTVSS

SEQ ID NO: 102 - protein, 107 aa, Artificial Sequence
  Synthetic
DIQMTQSPSSLSASVGDRVTITCRASQSITSYLSWYLQKPGEAPKLLIYAASILQSGVPSRFGGNGSGTDFTLTISSLQPEDFATFYCQQTYRSPLTFGGGTKVEIK

SEQ ID NO: 103 - protein, 123 aa, Artificial Sequence
  Synthetic
EVQLVESGGGLVQPGGSLRLSCAASGFTVSSNYMSWVRQAPGKGLEWVSVIYSGGSAYYADSVKGRFTISRDNSKNTLYLQMNSLRAEDTAVYYCARDLRDQDGYSYGAFDYWGQGTLVTVSS

SEQ ID NO: 104 - protein, 110 aa, Artificial Sequence
  Synthetic
QSALTQPASVSGSPGQSITISCTGTSSDVGGYNYVSWYQQHPGKAPKLMIYDVSNRPSGVSNRFSGSKSGNTASLTISGLQAEDEADYYCSSYTSSSSWVFGGGTKLTVL

SEQ ID NO: 105 - protein, 123 aa, Artificial Sequence
  Synthetic
EVQLVESGGGLVQPGGSLRLSCAVSGFTVSSNYMTWVRQAPGKGLEWVSLIYSGTSAFYADSVKGRFTISRDNSKNTLYLQMSSLRVNDTAIYYCARDLRKDDGYSYGAFDYWGQGTLVTVSS

SEQ ID NO: 106 - protein, 110 aa, Artificial Sequence
  Synthetic
QSALTQPASVSGSPGQSITISCSGTSSDVGAHNYVSWYQQYPGKAPKLMIFDVTDRPSGVSNRFSGSKSGNTASLTISGLQAEDEADYYCTSYTTNRSWVFGGGTKVTVL

SEQ ID NO: 107 - protein, 118 aa, Artificial Sequence
  Synthetic
QVQLVQSGAEVKKPGSSVKASCKASGGTFSTYTISWVRQAPGHGLEWMGRIIPIFGTTKYAQKFQGRVTITADESTTTAYLELSSLRSEDTAVYYCTINTQWDLVPRWGQGTLVTVSS

SEQ ID NO: 108 - protein, 108 aa, Artificial Sequence
  Synthetic
EIVLTQSPGTLSLSPGERATLSCRASQSVSSSYLAWYQQKPGQAPRLLIYGASSRATGIPDRFSGSGSGTDFTLTISRLEPEDFAVYYCQQYGSSLYTFGQGTKLEIK

SEQ ID NO: 109 - protein, 121 aa, Artificial Sequence
  Synthetic
  misc_feature (111)..(111): Xaa can be any naturally occurring amino acid
EVQLVESGGGLVKPGGSLRLSCAVSGFTFSNVWMSWVRQAPGKGLEWVGRIKSKTDGGTTDYAAPVKGRFTISRDDSKNTLYLQMNSLKTEDTAVYYCTSQLWLRGPGDYXGPGNPGHRLL

SEQ ID NO: 110 - protein, 111 aa, Artificial Sequence
  Synthetic
NFMLTQPHSVSESPGKTVTISCTGSSGSIASNYVQWYQQRPGSAPTTVIYEDNQRPSGVPDRFSGSIDSSSNSASLTISGLKTEDEADYYCQSYDSSLNWVFGGGTKLTVL

SEQ ID NO: 111 - protein, 121 aa, Artificial Sequence
  Synthetic
EVQLVESGGGLVKPGGSLKVSCTASGFTFTDAWMSWVRQAPGKGLEWVGRIKSRAYGGTTDYGAPVQGRFTISRDDSINTLYLQMNSLTAEDTAVYYCTSQLWLRGPGDYWGQGTLVTVSS

SEQ ID NO: 112 - protein, 111 aa, Artificial Sequence
  Synthetic
NFMLTQPHSVSESPGKTVTISCTGSSGSIASNYVHWYQQRPGGAPTTVIYEDNQRPSGVPDRFSGSIDISSNSASLTISGLKTEDEGDYYCQSYDSGVNWVFGGGTKLTVL

SEQ ID NO: 113 - protein, 130 aa, Artificial Sequence
  Synthetic
EVQLVQSGAEVKKPGESLKISCKGSGYYFTRQWIGWVRQMPGKGLEWMGIIYPGDSDTRYSPSFQGQVTISADKSISTAYLQWSSLKASDTAMYYCARGGWDPAEYSSSGGGGLDAFDIWGQGTMVTVSS

SEQ ID NO: 114 - protein, 107 aa, Artificial Sequence
  Synthetic
EIVLTQSPATLSLSPGERATLSCRASQSVSSYLAWYQQRPGRAPRLLIYDASNRATGIPGRFSGSGSGTDFSLTISSLEPEDFAVYYCQQRSSWPLTFGQGTRLEIK

SEQ ID NO: 115 - protein, 127 aa, Artificial Sequence
  Synthetic
EVQLVQSGAEVKKPGESLRISCKGSGYSFTGYWISWVRQMPGKGLEWMGRIDPSDSYTNYSPSFEGHVTFSADTALSTAYLQWSSLQASDTAIYFCGRIAPPGRGSYYPTQNYMDVWGKGTTVTVSS

SEQ ID NO: 116 - protein, 108 aa, Artificial Sequence
  Synthetic
EIVLTQSPGTLSLSPGERATLSCTADQSVPNSYLAWYQHKPGQAPRLLIYGASSRATGIPDRFSGSGSGIDFTLTISRLEPEDFAVYYCQQYGSLLLTFGGGTKVEIK

SEQ ID NO: 117 - protein, 130 aa, Artificial Sequence
  Synthetic
QVQLVQSGAEVKKPGSSVKVSCKASGGTFTSYAFSWVRQAPGQGLEWMGGIIPIFGTTNYAQKFQGRVTITADESTSTAYMELSSLRSEDTAVYYCARPEGCGSRTSCTPGAYYYGMDVWGQGTTVTVSS

SEQ ID NO: 118 - protein, 109 aa, Artificial Sequence
  Synthetic
EIVLTQSPATLSLSPGERATLSCRASQSVGSYLAWYQQKPGQAPRLLIYDASNRATGIPARFSGSGSGTDFTLTISSLEPEDFAFYFCQQRNSWPPEYSFGQGTKLEIK

SEQ ID NO: 119 - protein, 127 aa, Artificial Sequence
  Synthetic
QVQLVESGGGVVQPGRSLKLSCAASGFTFKTYGMHWVRQAPGKGLEWVAVISYDGTNDYYADSVKGRFTVSRDNSKNTLYLQMNSPRTEDTAVYYCAKAGGPYYYDTSGSFWYFDYWGQGTLVTVSS

SEQ ID NO: 120 - protein, 103 aa, Artificial Sequence
  Synthetic
DIQMTQSPSSLSASVGDRVTITCRASQTISSYLNWYQQKSGKAPELLVYDASNLESGVPSRFSGSGSGTDFTLTISSLQPEDFATYYCQQSYSFGPGTKVDIK

SEQ ID NO: 121 - protein, 127 aa, Artificial Sequence
  Synthetic
QVQLVESGGGVVQPGRSLRLSCAASGFIFSHYGMHWVRQAPGKGLEWVAVILYDGSDQYYADSVKGRFTISRDNSKNTLFLEMNSLRLEDTAVYYCAKGGGQYCSHGNCYLNYFDYWGQGALVTVSS

SEQ ID NO: 122 - protein, 107 aa, Artificial Sequence
  Synthetic
DIQMTQSPSSLSASVGDRVTITCQASQDIRDNLNWYQQKPGKAPQLLIYDASNLQPGVPSRFSGSGSGTHFTFTISRLQPEDIATYFCQQYANLPTTFGPGTKVDIK

SEQ ID NO: 123 - protein, 127 aa, Artificial Sequence
  Synthetic
QVQLVQSGAEVKKPGSSVKVSCKASGGPFSSYAFTWVRQAPGQGLEWMGGIIATFGTVNYAQKFQGRVTITADEFTSTVNMELSSLRSDDTAVYYCARRDCSTTSCYDEVLYRLVDWGQGTLVTVSS

SEQ ID NO: 124 - protein, 108 aa, Artificial Sequence
  Synthetic
EIVLTQSPGTLSLSPGERATLSCRASQSVNSDYLAWYKQKPGQAPRLLIYGTSSRATGIPDRFSGSGSGTDFTLTISRLEPDDFAVYYCQQYGNSPRTFGQGTKVEIK

SEQ ID NO: 125 - protein, 129 aa, Artificial Sequence
  Synthetic
EVQLVESGGGLVKPGGSLRLSCAASGFTFSNAWMSWVRQAPGKGLEWVGRIKSKTDAETTDYAAPVRGRFTISRDNSKNTLYLEMNSLKTEDTAVYYCTTDADYSDSSGYYVTYYFEYWGQGSLVTVSS

SEQ ID NO: 126 - protein, 111 aa, Artificial Sequence
  Synthetic
QSALTQPRSVSGSPGQSVTISCTGSNSDVGGYNYVSWYQQHPGKAPKLVIYDVSLRPSGVPDRFSGSKSGITASLTISGLQPEDEAHYYCCSFAGTYTPWVFGGGTRLTVL

SEQ ID NO: 127 - protein, 116 aa, Artificial Sequence
  Synthetic
QVQLQESGPGLVKPSGTLSLTCTVSGGSINSRNWWSWVRQPPGKGLEWIGEIFHSGSTNYNPSLESRVAISIDKSHNHFSLKLTSVTAADTAVYYCARANGILDFWGQGTLVTVSS

SEQ ID NO: 128 - protein, 106 aa, Artificial Sequence
  Synthetic
DIQMTQSPSSLSASVGDRVTITCRASQGISNSLAWYQLKPGKAPKLLLYAASTLESGVPSRFSGSGSGTNFTLTISSLQPEDFASYCCQHYYSSPRTFGQGTKVEI

SEQ ID NO: 129 - protein, 127 aa, Artificial Sequence
  Synthetic
QVQLVESGGGVVQPGRSLRIACGASGFTFSTYDMHWVRQAPVKGLEWVAVISRDGSGKFYADSVKGRFTISRDNSKKTLYLQMDSLRPEDTAMYYCARDFESRTWDPPKYYYALDVWGQGTTVTVSS

SEQ ID NO: 130 - protein, 108 aa, Artificial Sequence
  Synthetic
DIQMTQSPSSLSASVGDRVTITCRASQSISTYLNWYQQKPGKAPSLLIYAASSLYSGVPSRFSGSGSGTDFSLTISSLQPEDFATYYCQQTYTTPTWTFGQGTKVEIK

SEQ ID NO: 131 - protein, 127 aa, Artificial Sequence
  Synthetic
EVQLVQSGAEVKKPGESLRISCKGSGYSFHTYWIHWVRQMPGKGLEWMGKIDPSDSYTNYSPSFQGHVTFSADRSISTAYLQWSSLKASDTATYYCARLSWSPPTRTTDEKNWFDPWGQGTLVTVSS

SEQ ID NO: 132 - protein, 107 aa, Artificial Sequence
  Synthetic
DIQLTQSPSFLAASAGDRVTITCRASQGISSYLAWYQQKPGKAPKVLIYAASTLQSGVPSRFSGSGSGTEFTLTISSLQPEDCATYYCQQFNSDPLTFGGGTKVEIK

SEQ ID NO: 133 - protein, 119 aa, Artificial Sequence
  Synthetic
EVQLVQSGAEVKKPGESLTISCKDSGNSFTIYWIGWVRQMPGKGLEWMGMIYPGDSGTRYSPSFEGQVTISADESINTAYLQWRSLKASDTAMYYCVRGIAVDWYFDLWGRGTLVTVSS

SEQ ID NO: 134 - protein, 111 aa, Artificial Sequence
  Synthetic
QSVLTQPPSVSGAPGQRVTISCTGSSSNIGAGFDVHWYQQLPGTAPKLLIYGNNNRPSGVPDRFSGSKSATSASLAITGLQAEDEADYYCQSSDSSLSGLYVFGTGTNVIV

SEQ ID NO: 135 - protein, 127 aa, Artificial Sequence
  Synthetic
QVQLVQSGAEVKKPGSSVKVSCKASGGTFSSYAISWVRQAPGQGLEWMGRIIPILGIANYAQKFQGRVTITADKSTSTAYMELSSLRSEDTAVYYCARDSEYSSSWYSRGYYGMDVWGQGTTVTVSS

SEQ ID NO: 136 - protein, 112 aa, Artificial Sequence
  Synthetic
DIVMTQSPLSLPVTPGEPASISCRSSQSLLHSNGYNYLDWYLQKPGQSPQLLIYLGSNRASGVPDRFSGSGSGTDFTLKISRVEAEDVGVYYCMQALQTPPTFGGGTKVEIK

SEQ ID NO: 137 - protein, 127 aa, Artificial Sequence
  Synthetic
QVQLVQSGAEVKKPGSSVKVSCKASGDTFTNYAFSWMRQAPGQGLEWMGRIIPILGIVKYSQKFQDRVRISADKSTSTAYMDLSSLRSEDTAMYYCARDSEFSTSWFSRGYHGMDVWGQGTTVTVSS

SEQ ID NO: 138 - protein, 112 aa, Artificial Sequence
  Synthetic
DIVMTQSPLSLPVTPGEPASISCRSSQSLLHGDGYNYLDWYLQKPGQSPHLLIYLGSNRTSGVSDRFSGSGSGTDFTLKISRVEAEDVGVYYCMQALQTPPTFGGGTKVEIK

SEQ ID NO: 139 - protein, 127 aa, Artificial Sequence
  Synthetic
QVQLQQWGAGLLKPSETLSLTCAVYGGTFSGYSWTWIRQPPGKGLDWIGEINHSGSTNYNPSLKSRVTISVDTSKNQFSLKLSSVTAADTAVYYCARAGFGFVITSRSGTDPLFDYWGQGTLVTVSS

SEQ ID NO: 140 - protein, 112 aa, Artificial Sequence
  Synthetic
QSVLTQPPSVSGAPGQRVTISCTGSSSNIGAGYDVHWYQQLPGTAPKVLIYGNNNRPSGVPDRFSGSKSGTSASLAITGLQAEDEADYYCQSYDTSLSGSRVFGGGTKLTVL

SEQ ID NO: 141 - protein, 120 aa, Artificial Sequence
  Synthetic
EVQLVESGGGLVQPGRSLRLSCTGSEFTFGDFSMSWFRQAPGKGLEWVGFIRRKADGGTTEYAASVRGRFTISRDDSKSIAYLVMNSLKSEDTAVYYCTRAWIPTPHDYWGQGVLVTVSS

SEQ ID NO: 142 - protein, 109 aa, Artificial Sequence
  Synthetic
QSVLTQPPSASGTPGQRVTISCSGSSSNIGSNPVNWYQQLPGTAPKLLIYSNNRRPSGVPDRFSGSKSGASASLAISGLQSEDEAAYYCAAWDDSRKGPVFGGGTKLTV

SEQ ID NO: 143 - protein, 120 aa, Artificial Sequence
  Synthetic
EVQLVESGGGLVQPGRSLRLSCTASGFTFADFSMTWFRQAPGKGLEWVGFIRREADGGTTEYAASVRGRFTISRDDSKGIAYLLMNSLKSEDTAMYYCSRAWIPTPHDYWGQGTLVTVSS

SEQ ID NO: 144 - protein, 109 aa, Artificial Sequence
  Synthetic
QSVLTQPPSASGTPGQRVTISCSGGSSNIGSNPVNWYQQLPGTAPKLLIYSNNQRPSGVPDRFSGSKSGASASLAISGLQSEDEADYYCAAWDDSLKGPVFGGGTKVTV

SEQ ID NO: 145 - protein, 118 aa, Artificial Sequence
  Synthetic
EVQLVQSGAEVKKPGDSLKISCKGSGYSFISHWIAWVRQKPGKGLEWMGIIHPGDSDTRYSPSIQGQVTISADRFITTAYLQWSSLQASDTAMYYCARRGSSWEIDHWGQGTLVTVSS

SEQ ID NO: 146 - protein, 110 aa, Artificial Sequence
  Synthetic
QSVLTQPPSASGTPGQRVTISCSGSSSNIGSYTVNWYHQVPGTAPKVLIYGNTQRPSGVPDRFSGSKSGTSASLAISGLQSEDEGDYYCAAWDDSLDGWMFGGGTTLTVL

SEQ ID NO: 147 - protein, 121 aa, Artificial Sequence
  Synthetic
QVQLQESGPGLVKPSETLSLNCNVSGGSISNYYWSWIRQPPGKGLEWIGFISYSGSTDYNPSLKSRVIISIDTSKKHFSLNLSSVTAADTAVYFCARHYDILTALSWFDPWGQGTLVTVSS

SEQ ID NO: 148 - protein, 110 aa, Artificial Sequence
  Synthetic
QSVLTQPPSVSAAPGQTVTISCSGSSSNIRNNFVSWYQQFPGTAPKLLIYDNNKRPSGIPDRFSGSKSGTSATLGITGLQTGDEADYYCGTWDSSPSACWVFGAGTKLTV

SEQ ID NO: 149 - protein, 124 aa, Artificial Sequence
  Synthetic
QVQLVESGGGVVQPGRSLTLSCTASGFTFNRFAMFWVRQAPGKGLEWVAVISFDGSYEHYAESVKGRFAIFRDNPKNTLYLQMNSLRAEDTAVYYCAKSPINYCANGVCYPDSWGQGTLVTVSS

SEQ ID NO: 150 - protein, 111 aa, Artificial Sequence
  Synthetic
NFMLTQPHSVSESPGKTVTISCTGSSGSIANNYVQWYQQRPGSAPTTVIFEDTQRPSGVPDRFSGSIDSSSNSASLNISGLKPEDEADYYCQSFDVNSRWVFGGGTKLTVL

SEQ ID NO: 151 - protein, 117 aa, Artificial Sequence
  Synthetic
EVQLVESGGGLVQPGGSLRLSCAASGIIVSNNYMSWVRQAPGKGLEWVSTIFSGGSTYYADSVKDRFTISRDNSNNTLYLQMNSLRPEDTAVYYCTRLGGYRYGMDVWGQGTTVTVS

SEQ ID NO: 152 - protein, 107 aa, Artificial Sequence
  Synthetic
DIQMTQSPSSLSASVGDRVTITCQASQDISKYLNWYQQKPGTAPKLLIYDASELERGVPSRFSGSGSGTDFTFTIISLQPEDIATYYCLQYDNLPYTFGQGTKLEIK

SEQ ID NO: 153 - protein, 116 aa, Artificial Sequence
  Synthetic
EVQLVESGGGLVQPGGSLRLSCTASRLTVSSNYMNWVRQAPGKGLEWVSVIYAGGSTFYADSVKDRFTISRDNSMNTLYLQMNSLRVEDTAVYYCARLGGYRYGMDVWGQGTTVTV

SEQ ID NO: 154 - protein, 106 aa, Artificial Sequence
  Synthetic
DIQMTQSPSSLSASVGDRVTITCQASQDISNYLNWYQQSPGKAPKLLIYDASKLETGVPSRFSGSGSGTDFTFTISSLQPEDIATYYCLQYDNLPYSFGQGTKLEI

SEQ ID NO: 155 - protein, 124 aa, Artificial Sequence
  Synthetic
QVQLVQSGAEVKKPGSSVRVSCKASGGTFSSFTITWVRQAPGQGLEWMGRIIPNLNIPNYAQRFQGRITITAEKSTSTAYLELSSLRSEDTAVYYCARGVGYSGSGSNWYFDLWGRGTLVTVSS

SEQ ID NO: 156 - protein, 110 aa, Artificial Sequence
  Synthetic
QSVLTQPPSVSGAPGQRVTISCTGSSSNIGAGYDVHWYQQLPGTAPKLLISGHINRPSGVPDRFSGSTSGTSASLAITGLQAEDEADYYCQSYDSSLSDSVFGGGTKLTV

SEQ ID NO: 157 - protein, 123 aa, Artificial Sequence
  Synthetic
EVQLVESGGGLVQPGRSLRLSCAASGFTFDDYGMHWVRQAPGKGLEWVSGISWNSGSIAYAEFVKGRFTISRDNAKNSLYLQMNSLRTEDTALYYCAKAVPTSCYVFCALDIWGQGTMVTVSS

SEQ ID NO: 158 - protein, 108 aa, Artificial Sequence
  Synthetic
DIQMTQSPSSLSASVGDRVTITCRASQGISNYLAWYQQSPGKVPKLLIYAASTLQSGVPSRFSGSGSGTDFTLTISSLQPEDVATYYCQKYNSGPALTFGGGTKVEIK

SEQ ID NO: 159 - protein, 125 aa, Artificial Sequence
  Synthetic
EVQLVESGGGLVKPGRSLRLSCSASGFTFGDYAMTWFRQAPGKGLQWVGFIRSKPFGGTTQYAASVKGRFTISRDDSNNVAYLQMNSLKTEDTGVYYCTRLRQVQGVPGYYFDQWGQGALVTVSS

SEQ ID NO: 160 - protein, 106 aa, Artificial Sequence
  Synthetic
EIVMTQSPATLSVSPGERATLSCRASQSVSSNLAWYQQKPGQAPRLLIYGASIRATGIPARFSGSGSGTEFTLTISSLQSEDFVVYYCQEYDNWFAFGGGTKVEIK

SEQ ID NO: 161 - protein, 119 aa, Artificial Sequence
  Synthetic
EVQLVESGGGLIQPGGSLRLSCAASGFTFSSYDMHWVRQVTGKGLEWVSAIGTAGDRYYLDSVKGRFTISRENAKNSLHLQMNNLRVGDTAVYYCARASGVLTTHFDSWGRGTLVTVSS

SEQ ID NO: 162 - protein, 108 aa, Artificial Sequence
  Synthetic
DIQMTQSPSSLSASVGDRVTITCRASQSIGRHLSWHQQKLGKAPKLLIYSASSLQSGVPSRFSGSGSGTDFTLTISSLQPEDFATYYCQQSYETPPWTFGQGTKVEIK

SEQ ID NO: 163 - protein, 124 aa, Artificial Sequence
  Synthetic
QVQLVESGGGVVQPGRSLRLSCAASGFTFRIYAMHWVRQAPGKGLEWVAIIWNDGSKQYYADSMKGRFTISRDNSKNTLYLQMNSLRDEDTALYYCAREGVALAGNGVDGFDIWGQGTMVTVSS

SEQ ID NO: 164 - protein, 107 aa, Artificial Sequence
  Synthetic
DIQMTQSPSSLSASVGDRVTITCRASQTISTFLNWYRQIPGKAPKLLIYAASSLQSGVPSRFSGSGSGTDFTLTISSLQPEDFATYYCQQTYSTPYTFGRGTKLEIK

SEQ ID NO: 165 - protein, 125 aa, Artificial Sequence
  Synthetic
QVQLVESGGGVVQPGRSLRLSCAASGFTFRIYAMHWVRQAPGKGLEWVAIIWNDGNKKDYVDSVKGRFTISRDNSRNTVYLQMNSLRVDEDTAVYYCAREGVAVGGNGVDGFDMWGQGTMVTVSS

SEQ ID NO: 166 - protein, 107 aa, Artificial Sequence
  Synthetic
DIQMTQSPSSLSSSVGDRVTITCRASQSIGIYLNWYQQKPGKVPNLLIYAASTLQTGAPSRFSGSGSGTDFILSISSLQPEDFATYYCQQTYSVPYTFGQGTKLEIK

SEQ ID NO: 167 - protein, 121 aa, Artificial Sequence
  Synthetic
QVQLQESGPGLVKPSETLSLTCTVSGGSISSYYWSWIRQPPGKGLEWIGYIYYSGSTNYNPSLKSRVTISVDTSKNQFSLKLSSVTAADTAVYYCARLLSTEWLFNWFDPWGQGTLVTVSS

SEQ ID NO: 168 - protein, 107 aa, Artificial Sequence
  Synthetic
SYELTQPPSVSVSPGQTASITCSGDKLGDKYACWYQQKPGQSPVLVIYQDSKRPSGIPERFSGSNSGNTATLTISGTQAMDEADYYCQAWDSSTAYVFGTGTKVTVL

SEQ ID NO: 169 - protein, 121 aa, Artificial Sequence
  Synthetic
QVQLQESGPGLVKPSETLSLTCTVSGDSINKYYWGWIRQPPGKGLEWIGYIYYSGTTNYNPSLKSRVTISVDTSKTQFSLKLSSVTAADTAVYYCARLLSTEWSFNWFDPWGQGTLVTVSS

SEQ ID NO: 170 - protein, 107 aa, Artificial Sequence
  Synthetic
SYELTQPPSVSVSPGQTASITCSGDTLGDKYACWYQQKPGQSPLLVIYQNNKRPSGIPERFSGSNSGNTATLTISGTQAMDEADYYCQAWDSSTAYVFGTGTKVTVL

SEQ ID NO: 171 - protein, 128 aa, Artificial Sequence
  Synthetic
EVQLVESGGGLVKPGGSLRLSCAASGFTFNNAWMTWVRQAPGKGLEWVGRIKSKTDGGTTDYGTPAKGRFTISRDDSKNTLYLQMKSLRTEDTAVYYCTTVDVQGIWELLENDAFDIWGQGTMVTVSS

SEQ ID NO: 172 - protein, 108 aa, Artificial Sequence
  Synthetic
EIVLTQSPGTLSLSPGERATLSCRATQAISSTYLAWYQQKPGQAPRLLIYGAFSRAPGIPDRFSGSGSETDFTLTISRLEPEDFAVYYCQQSDRSPFTFGPGTKVDIK

SEQ ID NO: 173 - protein, 117 aa, Artificial Sequence
  Synthetic
EVQLVESGGGLVQPGGSLRLSCAASEFIVSRNYMSWVRQAPGKGLEWVSLIYPGGSTYYPDSVKGRFTISRDNSKNTLYLQMNSLRGEDTAVYYCARDLGDSRLDYWGQGALVTVSS

SEQ ID NO: 174 - protein, 109 aa, Artificial Sequence
  Synthetic
DIQLTQSPSFLSASVGDRVTITCRASQGISSYLAWYQQDPGKAPKLLIYAASTLQSGVPSRFSGSGSGTEFTLTISSLQPEDFATYYCQQLDSYPPGYSFGQGTKLEIK

SEQ ID NO: 175 - protein, 126 aa, Artificial Sequence
  Synthetic
EVQLVESGGGLEKPGRSLRLSCIGSGFTFGDYAMGWFRQAPGKGLEWVGFIRSKAYGGASEYAASVKGRFTISRDDSKSIAYLQMNSLKTEDTAVYFCTRRAHYSGSGLSSYVDYWGQGTLVTVSS

SEQ ID NO: 176 - protein, 109 aa, Artificial Sequence
  Synthetic
QTVVTQEPSLTVSPGGTVTLTCGSSTGTVTSGQYPYWFQQKPGQAPKTLIYDTSSKHSWTPARFSGSLLGGKAALTLSGAQPEDEAEYYCLISYSGAWVFGGGTKLTVL

SEQ ID NO: 177 - protein, 124 aa, Artificial Sequence
  Synthetic
EVQLVESGGDLTQPGGSLRLSCAASGFTFSNYDMHWVRQATGKGLEWVSGIGTSGDTYYADSVKGRFTISRENAKNSLFLQMNHLRAGDTATYYCARTEYAWGSYRSYWYFDLWGRGTLVTVSS

SEQ ID NO: 178 - protein, 108 aa, Artificial Sequence
  Synthetic
DIQMTQSPSSLSASVGDRVTITCRTSQTISTYLNWYQQKPGKAPKVLIFAASSLQSGVPSRFSGSGSGTDFTLTISSLQPEDFATYFCQQSYSAPPWTFGPGTKVEIK

SEQ ID NO: 179 - protein, 124 aa, Artificial Sequence
  Synthetic
EVQLVESGGDLTQPGGSLRLSCAASGFTFSSYDMHWVRQATGKGLEWVSGIGTSGDTYYADSVKGRFTISRENAKNSLFLQMNNLRAGDTATYYCARTEYAWGSYRSYWYFDLWGRGTLVTVSS

SEQ ID NO: 180 - protein, 108 aa, Artificial Sequence
  Synthetic
DIQMTQSPSSLSASVGDRVTITCRTSQTISTYLNWYQQKPGKAPKVLIYAASSLQSGVPSRFSGSGSGTDFTLTISSLQPEDFATYFCQQSYSAPPWTFGPGTKVEIK

SEQ ID NO: 181 - protein, 118 aa, Artificial Sequence
  Synthetic
EVQLVESGGALIQPGGSLRLSCAASGFTVSSNDMTWVRQAPGKGLEWVSVIYTGGGTYHADSAKGRFIISRHNSKNTLSLQMNDLRAEDTAVYYCARLTMTTYYFDSWGQGTLVTVSS

SEQ ID NO: 182 - protein, 110 aa, Artificial Sequence
  Synthetic
SYELTQPPSVSLAPGQTARITCGGNGIGSKSVHWYQQKPGRAPVLVVYDDSVRPSGTPARFSGANSGNTATLTISRVEAGDEADYYCQVWDSFRDHQDWVFGGGTKLTVL

SEQ ID NO: 183 - protein, 120 aa, Artificial Sequence
  Synthetic
EVQLVESGGGLVQPGGSLRLSCAASGFTFSNYDMHWVRQVTGKGLEWVSLIGTAADAYYADSVKGRFTISRENAKNSLYLQINSLRAGDTAVYFCARGDSSGLYTFFDYWGQGTLVTVSS

SEQ ID NO: 184 - protein, 107 aa, Artificial Sequence
  Synthetic
DIQMTQSPSSLSASVGDRVTITCRASQSVTRYLNWYQLKPGKAPKLLIYAASSLQSGVPSRFSGSGSGTDFTLTISSLQPEDFATYYCQQSYSTLGLTFGGGTKVEI

SEQ ID NO: 185 - protein, 124 aa, Artificial Sequence
  Synthetic
QVQLVQSGAEVKKPGSSVKVSCKASGATFSNYIISWVRQAPGQGLEWMGRTIPLLDIANYAQKFQGRVTITADKSTRIVYMHLGSLTSEDTAVYYCATGKGYSSSSAAYYFDHWGQGTLVTVSS

SEQ ID NO: 186 - protein, 112 aa, Artificial Sequence
  Synthetic
QSVLTQPPSVSGAPGQRVTISCTGTNSNIGAGYDIHWYQQLPGTAPKLLIYGSNNRPSGVPDRFSGSKSGTSASLAITGLQAEDEADYYCQSYDSSLSGSEVFGGGTKLTVL

SEQ ID NO: 187 - protein, 122 aa, Artificial Sequence
  Synthetic
QVQLVESGGGVVQPGRSLRLSCVASGFTFSNYGMHWVRQAPGKGLEWVAVILYDGSDKYYLDSVKGRFTISRDNSKNTLFLQLNSLRAEDTAVYYCAKEGNGYGYQYAGMDVWGQGTTVTVS

SEQ ID NO: 188 - protein, 110 aa, Artificial Sequence
  Synthetic
QSALTQPASVSGSPGQSITISCTGTNSDVGGYDYVSWYQQHPGKAPKLIIFEVINRPSGVSNRFSGSKSGNTASLTISGLRAEDEADYYCCSYTTSTTRVFGGGTKLTVL

SEQ ID NO: 189 - protein, 121 aa, Artificial Sequence
  Synthetic
QVQLVQSGAEVKKPGSSVKVSCEASGGTFSSDSINWVRQAPGQGLEWMGRIIPIFGATNYAQKFQGRVTITADKSTDTVYMEVSSLTSEDTAVYYCARGGIAVGGWWFDPWGQGTLVTVSS

SEQ ID NO: 190 - protein, 108 aa, Artificial Sequence
  Synthetic
EIVMTQSPATLSVSPGERATLSCRASESVSSKLAWYQQKPGQAPRLLIYGASTRATGISARFSGSGSGTDFTLTISSLESEDFAVYYCQQYNHWPPNTFGQGTKLEIK

SEQ ID NO: 191 - protein, 116 aa, Artificial Sequence
  Synthetic
EVQLVESGGGLVQPGGSLRLSCAASGFTFSNYDMHWVRQVTGNGLEWVAAIGTSGDTYYPDSVKGRFTISRENVKNSLFLQMNSLRAGDTAVYYCARGGSSSWLWYFDLWGRGTLV

SEQ ID NO: 192 - protein, 108 aa, Artificial Sequence
  Synthetic
DIQMTQSPSSLSASVGDRVTITCRASQSISSHLNWYQQKPGKVPKLLIYAASTLQSGVPSRFSGSGSGTDFTLTISSLQPEDFATYYCQQSYSMPPVTFGQGTRLEIK

SEQ ID NO: 193 - protein, 127 aa, Artificial Sequence
  Synthetic
EVQLVESGGGLVQPGGSLRLSCAASGFTFSNYDMHWVRQPTGGGLEWVSAIGTAGDTYYLASVKGRFTISRENAKNSLSLQMNSLRAGDTAVYYCVRGDTLVQGVIKAYYYYFMDVWGQGITVTVSS

SEQ ID NO: 194 - protein, 108 aa, Artificial Sequence
  Synthetic
DIQMTQSPSSLSASVGDRVTITCRASQNISRYLNWYQQKPGKAPRLLIYAASTLQSGVPSRFSASGSGTDFTLTITNLQPEDFAVYYCQQTYVMPPYTLAQGTKLEIK

SEQ ID NO: 195 - protein, 127 aa, Artificial Sequence
  Synthetic
QVQLVESGGGVVRPGRSLRLSCAASGFTFSKYGMHWVRQAPGKGLECVASIAYDGSDDSYADSVKGRFIISRDNSKNTLYLQMNSLRAADTAVYYCAKVLGSYCSASSCHGQRPDYWGQGTLVTVSS

SEQ ID NO: 196 - protein, 108 aa, Artificial Sequence
  Synthetic
DIQMTQSPSSLSAYVGDRVTITCQASQDISNHLNWYQQKPGKAPNLLIYDASNLETGVPSRFSGSGSGTDFSFTISSLQPEDIATYYCQQYDNVPPWTFGQGTKVEIK

SEQ ID NO: 197 - protein, 128 aa, Artificial Sequence
  Synthetic
QVQLVQSGTEVKKPGDSVQVSCKTSGYSFTGYYIHWVRQAPGQGLEWMGRINPNSGGTNYAQKFQGRVIMTRDTSITTAFMELTRLRYDDTAVYFCAREPIEGVIGGMIVNYYYMDVWGRGTTVTVSS

SEQ ID NO: 198 - protein, 111 aa, Artificial Sequence
  Synthetic
QSALTQPASVSGSPGQSITISCTGTSSDVGGYYYVSWYQQHPGKAPKLMIYDVSSRPSGVSNRFSGSKSGNTASLTISGLQAEDEADYYCSSYTSSNTLVVFGGGTKLTVL

SEQ ID NO: 199 - protein, 128 aa, Artificial Sequence
  Synthetic
QVQLVQSGAEVKKPGASVKVSCKASGYIFTGYYMHWVRQAPGQGLEWMGRINPNSGGSRYAEKFQGRVTMTRDTSIITAFMELRGLKSDDTAVYYCAREPIEAVPAGIIVNYYYMDVWGNGTTVTVSS

SEQ ID NO: 200 - protein, 111 aa, Artificial Sequence
  Synthetic
QSALTQPASVSGSPGQSITISCTGTSSDVGGYNYVSWYQQHPGKAPKLMIYDVTSRPSGVSDRFSGSKSGTTASLTISGLQAEDEADYYCSSFTSAFTLVVFGGGTKLTVL

SEQ ID NO: 201 - protein, 119 aa, Artificial Sequence
  Synthetic
EVQLVQSGAEVKKPGETLKISCKGSGDSFSNYWIGWVRQSPGKGLEWMAIVYPGDSDARYSPSFQGQVTISADKSVTTAYLKWSSLKASDTAIYYCVRGLPVDWYFDLWGRGTLVTVSS

SEQ ID NO: 202 - protein, 111 aa, Artificial Sequence
  Synthetic
QSVLTQPPSVSGAPEQRVTISCTGSSSNIGAGHDVHWYQQLPGTAPKLLIYNNNNRPSGVPDRFSGSKSGASASLAISGLQAEDEAEYYCQSYDKSLSVLYVLGTGTKVTV

SEQ ID NO: 203 - protein, 121 aa, Artificial Sequence
  Synthetic
QVQLQESGPGLVKPSETLSLTCNVSGDIINKYYWSWIRQSPGKGLEWIGYIYYSGTTYYNPSLKSRVTMSVGTSKQQFSLRLTSVTAADTAVYYCARMLSTEWSFNWFDPWGPGTLVTVSS

SEQ ID NO: 204 - protein, 107 aa, Artificial Sequence
  Synthetic
SYELTQPPSVSVSPGQAASITCSGDKLGDKFACWYQQKPGQSPVLVIYQNDKRPTGIPERFSGSNSGNTATLTISGTQAMDEADYFCQAWDSTSASVFGTGTKVTVL

SEQ ID NO: 205 - protein, 124 aa, Artificial Sequence
  Synthetic
QVQLVQSGPEVKKPGSSVKVSCKASGGNFNSYTITWVRQAPGHGLEWMGRIIPTLGVANYALNFQDRITITADKSTSTAYMDLSSLRSEDTAVYYCARETGYSGFLAVAYMDVWGNGTTVTVSS

SEQ ID NO: 206 - protein, 110 aa, Artificial Sequence
  Synthetic
QSVLTQPPSVSGAPGQRVTISCTGSSSNVGAGYDVHWYQQLPGTAPKLLIYRNNNRPSGVPDRFSGSKSGSSASLDITGLQAEDEADYYCQSYDSSLSDSVFGGGTKLTV

SEQ ID NO: 207 - protein, 116 aa, Artificial Sequence
  Synthetic
EVQLVESGGGLVRPGGSLRLSCAASGFTVGSNFMSWVRQAPGKGLEWVSLIYSGGGTHYAESVKGRFTISRDKSKNTLYLQMNSLRAEDTAVYYCANQGYYYYMDVWGKGTTVTVS

SEQ ID NO: 208 - protein, 111 aa, Artificial Sequence
  Synthetic
QSALTQPASVSGSPGQSITISCTGTSSDVGAYNYVSWHQHHPGKAPKLIIYDVSNRPSGVSNRFSGSKSGNTASLTISGLQAEDEADYYCTSYTNTTTPWVFGGGTKLTVL

SEQ ID NO: 209 - protein, 122 aa, Artificial Sequence
  Synthetic
QVQLQESGPGLVKPSQTLSLTCTVSGGSISSGGYFWSWIRQHPGKGLEWLGYNYYTGTPHYNPSLKSRLVISIDTSKNQFSLKLSSVTAADTAVYYCARGDTFGRGYYFDYWGQGTLVTVSS

SEQ ID NO: 210 - protein, 109 aa, Artificial Sequence
  Synthetic
SYELTQPPSVSVAPGQTARITCGGNNIGSKSVHWYQQKPGQAPVMVVYDDSDRPSGIPERFSGSNSGDTATLTISRVEAGDEADYSCQVWDRSSDHPWVFGGGTKLTVL

SEQ ID NO: 211 - protein, 122 aa, Artificial Sequence
  Synthetic
QVQLQESGPGLVKPSQTLSLTCTVSGGSISNGGYFWTWIRQHPVKGLEWIGYIYYSGSPHYNPSLKSRLSISLDTFKNQFSLNLSSVTAADTAVYYCARGDTFGRGYYFDFWGQGTLVTVSS

SEQ ID NO: 212 - protein, 109 aa, Artificial Sequence
  Synthetic
SYELTQPPSVSVAPGQTARITCGGNNIGTNSMHWYQQKPGQAPVLVVFDDSDRPSGIPERFSGSNSGNTATLTISRVEAGDEADYHCQVWDRSSDRPWVFGGGTKLTVL

SEQ ID NO: 213 - protein, 122 aa, Artificial Sequence
  Synthetic
EVQLLESGGGLVQPGGSLRLSCAASGFPFSIYAMSWVRQAPGKGLEWVSGMRGTTGTTYYADSVKGRFAISRDNSKNMLHLQMNSLRAEDTAVYYCAKSDHGDYVIGAFDIWGQGTMVTVSS

SEQ ID NO: 214 - protein, 110 aa, Artificial Sequence
  Synthetic
QSALTQPPSASGSPGQSVTISCTGTSGDVGGYNYVSWYQQHPGKAPKLMIYEVSKRPSGVPDRFSGSKSGNTASLTVSGLQAEDEADYYCNSYAGSNNWVFGGGTKLTVL

SEQ ID NO: 215 - protein, 120 aa, Artificial Sequence
  Synthetic
QVQLQESGPGLVKPSGTLSLTCAVSGVSISNTNWWNWVRQPPGKGLEWIGEIYHTGSARYNPSLRSRVTISVDKSKNQFSLRLNSATAADTAIYYCARAQTPEFGELLYWGQGALVTVSS

SEQ ID NO: 216 - protein, 108 aa, Artificial Sequence
  Synthetic
DIQMTQSPSSLSASVGDRVTITCRASQSITDHLNWYQQKPGKAPKLLIYAASSLQTGVPSRFSGSGSETDFTLTISTLQPEDFATYYCQQSYGPPTYSFGQGTKLEIK

SEQ ID NO: 217 - protein, 125 aa, Artificial Sequence
  Synthetic
EVQLVESGGGLIQPGRSLRLSCTASGFSVGDYAMSWFRQAPGKGLEWVGFLRNQHYGGTAEYAASVKGRFSISTDASKNIVYLQMDSLKTEDTAVYYCARNDRYIVIVPAEMLYWGQGTLVTVSS

SEQ ID NO: 218 - protein, 108 aa, Artificial Sequence
  Synthetic
EIVMTQSPATLSVSPGERATLSCRATESVYSNLAWYQQKPGQAPRLLMYDASTRAPGIPARFSGSGSGTEFTLTISSLQSEDFATYYCQQYSNWPPITFGQGTRLEIK

SEQ ID NO: 219 - protein, 128 aa, Artificial Sequence
  Synthetic
EVQLVESGGGLVQPGGSLRLSCVASGFTSTNYDMHWVRQAPGRGLQWVSSIGTAGDTYYPGSVRGRFTISRENAKNSLDLQMNSLRVGDTAVYYCARGQRGYYDRSGYYWGWRAFDIWGQGTMVTVSS

SEQ ID NO: 220 - protein, 106 aa, Artificial Sequence
  Synthetic
SYELTQPPSVSVAPGQTARITCGGNNIGNKSVYWYQQKPGQAPVLVVYDDSGRPSGIPERFSGSNSANTATLTISRVEAGDEADYYCQVWDNNSDQFGGGTKLTVL

SEQ ID NO: 221 - protein, 125 aa, Artificial Sequence
  Synthetic
EVQLLESGGGLVQPGGSLRLSCAASGFTFSKDAMSWVRQAPGKGLEWVSTVTGSGTNTYYADSVKGRFTISRDNSNNTLYLQMNSLRAEDTAVYYCANHPLGAAEGYYYYYMDVWGKGTTVTVSS

SEQ ID NO: 222 - protein, 109 aa, Artificial Sequence
  Synthetic
EIVLTQSPGTLSLSPGERGTLSCRASQRVPSSQLAWYQQKSGQAPRLLIYGASSRASGIPDRFSGSGSGTDFTLNISRLEPEDFAVYYCQQYGSLRALTFGGGTKVEIK

SEQ ID NO: 223 - protein, 122 aa, Artificial Sequence
  Synthetic
QVQLVQSGAEVKKPGASVKVSCKTSGYTFISYYIHWVRQAPGQGLEWMGIINPDGDNTNYAQKFQGRVTMTRDTSTSTVYMELSSLRFEDTAVYYCARGGAIPALRTAFDIWGQGTMVTVSS

SEQ ID NO: 224 - protein, 105 aa, Artificial Sequence
  Synthetic
DIQMTQSPSTLSASVGDRVTITCRASQSISNWLAWYQQKPGKAPKLLIYKASSLESGVPSRFSGSGSGTEFTLTISSLQPDDFATYYCQEYNSYYFGQGTKLEIK

SEQ ID NO: 225 - protein, 122 aa, Artificial Sequence
  Synthetic
QVQLVQSGAEVRRPGASVKVSCKASGYTLTHYYIHWVRQAPGQGLEWVGIINPDGDNTNYAQKFQGRVTMTRDTSTSTVYMELSSLRSEDTAIFYCARGGAIPALRSAFDIWGQGTMVTVSS

SEQ ID NO: 226 - protein, 105 aa, Artificial Sequence
  Synthetic
DIQMTQSPSTLSASVGDRVTITCRASQSINNWLAWYQQKPGKAPKLLIYKASTLESGVPSRFSGSGSGTEFTLTISSLQPDDFATYYCQQYNSYFFGQGTKLEIK

SEQ ID NO: 227 - protein, 122 aa, Artificial Sequence
  Synthetic
QVQLQESGPGLVKPSQTLSLSCTVSGGSISSDDYYWSWIRQPPGKGLEWIGYIYYSGSTYYNSSLKSRVSISVDTSKNQFSLKLSSVTAADTAVYYCARWKRWLQFLYFDYWGQGTLVTVSS

SEQ ID NO: 228 - protein, 110 aa, Artificial Sequence
  Synthetic
QSALTQPRSVSGSPGQSVTISCTGTSSDVGGYSFVSWYQQHPGKAPKVLIYDVDKRPSGVPDRLSGSKSGNTASLTISGLQAEDEADYYCCSYAGSYTLIFGGGTKLTVL

SEQ ID NO: 229 - protein, 122 aa, Artificial Sequence
  Synthetic
QVQLQESGPGLVKPSQTLSLTCTVSGGSISSGDYYWTWIRQPPGKGLEWIGYIFYSGITYYSPSLKSRLTMSIDTSKSQFSLNLSSVTAADTAVYYCARWKRLLQSLHFDYWGQGILVTVSS

SEQ ID NO: 230 - protein, 110 aa, Artificial Sequence
  Synthetic
QSALTQPRSVSGSPGQSVTISCTGTSSDVGSYDYVSWYQQHPGKAPKVMIYGVDERPSGVPHRFSGSKSGNTASLTISGLQADDEADYFCCFYAGSYTLLFGGGTKVTVL

SEQ ID NO: 231 - protein, 116 aa, Artificial Sequence
  Synthetic
EVQLVESGGGLVQPGGSLRLSCAASEFIVSSNYMTWVRQAPGKGLEWVSIMYPGGSTFYADSVKGRFTISRDNSKNTLYLQINRLRAEDTAVYYCARDIAGRLDYWGQGTLVTVSS

SEQ ID NO: 232 - protein, 108 aa, Artificial Sequence
  Synthetic
DIQMTQSPSSLSASVGDRVTITCQASQDINNYLNWYQQKPGKAPKLLIYDASNLETGVPSRFSGSGSGTDFSFTISSLQPEDIATYYCQQYDNLSRLTFGGGTKVEIK

SEQ ID NO: 233 - protein, 125 aa, Artificial Sequence
  Synthetic
QVQLVESGGGVVQPGRSLRLSCAASGFAFSSYGMNWVRQAPGKGLEWVTTVSSDGNVNYYIDSVKGRFTISRDNSKNTLYLQMNSLRGDDTAVYYCAKGPRFGWSYRGGSGFDIWGQGTMVTVSS

SEQ ID NO: 234 - protein, 107 aa, Artificial Sequence
  Synthetic
DIQMTQSPSSLSASVGDRVTITCQASQDISNYLNWYQQKPGKAPKLLIYDASNLETGVPSRFSGSGSGTDFTFTITSLQPEDIATYYCQQYDNLPITFGQGTRLEIK

SEQ ID NO: 235 - protein, 127 aa, Artificial Sequence
  Synthetic
QVQLVQSGAEVKKPGASVKVSCKASGYSFATYYIHWVRQAPGQGLEWMGIIDPSGGSTNYAQKFQGRVTMTRDTSTSTVYLELSSLRSEDTAVYYCARADTPIVVDTTSYFYYMDVWGKGTTVTVSS

SEQ ID NO: 236 - protein, 111 aa, Artificial Sequence
  Synthetic
QSALTQPASVSGSPGQSITISCTGTSRDIGFYKYVSWYQQHPGKAPKLIIYDVTNRPSGVSNRFSGSKSGNTASLTISGLQAEDEAHYHCSSYSTAYVHVLFGGGTRLTVL

SEQ ID NO: 237 - protein, 122 aa, Artificial Sequence
  Synthetic
QVQLVQSGAEVRKPGSSVKVSCKASGGPFDQYTFSWVRQAPGQGLEWMARITPVVDLTNYAQKFQGRITIITDKSTSTAYMELSSLRSEDTAIYYCATPLNDYYASGNLGLWGQGTLVTVSS

SEQ ID NO: 238 - protein, 107 aa, Artificial Sequence
  Synthetic
DIQMTQSPSSLSASIGDRVTITCRASQGISYYLAWFQQKPGEAPRSLIYDASSLQSGVPSKFSGSGSGTDFTLTISSLQPEDSATYYCQQYNSYPLTFGGGTKVEIK

SEQ ID NO: 239 - protein, 122 aa, Artificial Sequence
  Synthetic
QVQLVQSGSEMKKPGSSVKVSCKAAGGTLNTHTFSWVRQAPGQGLEWMGRITPTVDLTNYAQKFQGRITITADTSTNTAYLELRRLRSEDTAIYYCATPLNDYYASGNLGLWGQGTLVTVSS

SEQ ID NO: 240 - protein, 107 aa, Artificial Sequence
  Synthetic
DIQMTQSPSSLSASIGDTVTITCRASQGISYYLAWFQRKPGKAPKSLIYDASSLQSGVPSKFSGSGSGTDFTLTISSLQPEDSATYYCQQYSTYPLTFGGGTKVEIK

SEQ ID NO: 241 - protein, 125 aa, Artificial Sequence
  Synthetic
EVQLVESGGGLIQPGGSLRLSCAASGFTVSSNYMSWVRQAPGKGLEWVSVIYSGGSTYYADSVKGRFTISRDNSKNTLYLQMNSLRAEDTAVYYCARVVGYDFWSGYDGGYFDYWGQGTLVTVSS

SEQ ID NO: 242 - protein, 110 aa, Artificial Sequence
  Synthetic
QSALTQPASVSGSPGQSITISCTGTSSDVGSYNLVSWYQQHPGKAPKLMIYEVSKRPSGVSNRFSGSKSGNTASLTISGLQAEDEADYYCCSYAGSSTWVFGGGTKLTVL

SEQ ID NO: 243 - protein, 125 aa, Artificial Sequence
  Synthetic
EVQLVESGGGLLQPGGSLRLSCAASGFSVSSNYMTWVRQAPGKGLEWVAAIYSGDSTYYVDSVKGRFIISRDNSKNTVYLHLSSLRAEDTAVYYCARLVGYDFRSGSDGGYFDYWGHGTLVTVSS

SEQ ID NO: 244 - protein, 110 aa, Artificial Sequence
  Synthetic
QSALTQPASVSGSPGQSITISCTGTSSDIGNYNLVSWYQQHPGKAPKLMIYDVSKRPSGVSNRFSGSKSGNTASLTISGLQAEDETDYYCCSYAGSSTWVFGGGTKLTVL

SEQ ID NO: 245 - protein, 126 aa, Artificial Sequence
  Synthetic
QVQLVESGGGVVQPGRSLRLSCAASGFTFSSYAMHWVRQAPGKGLEWVAVISYDGSNKYYADSVKGRFTISRDNSKNTLYLQMNSLRAEDTAVYYCAKKGQPYCGGDCYFYYFDYWGQGTLVTVSS

SEQ ID NO: 246 - protein, 108 aa, Artificial Sequence
  Synthetic
DIQMTQSPSSLSASLGDRVTITCQASQDISNYLNWYQQKPGKAPKLLIYDASNLETGVPSRFSGSGSGTDFTFTISSLQPEDIATYYCQQYDNLPPITFGQGTRLEIK

SEQ ID NO: 247 - protein, 126 aa, Artificial Sequence
  Synthetic
QVQLVESGGGVVQPGRSLRLSCAVSGFTFSHYAMHWVRQAPGKGLEWVAVISYDGADKYYADSVRGRFTIARDNSKNTLFLQMSSLRPEDTAVYYCAKKGQPYCGGDCHFYYLDYWGQGTLVTVSS

SEQ ID NO: 248 - protein, 108 aa, Artificial Sequence
  Synthetic
DIQMTQSPSSLSASVGDRVTITCQASQDISNHLNWYQQKPGKAPKLLIYDASNLETGVPSRFSGSGSGTDFTFTISSLQAEDIATYYCQQYDNLPPITFGQGTRLEIK

SEQ ID NO: 249 - protein, 126 aa, Artificial Sequence
  Synthetic
QVQLVQSGAEVKKPGSSVKVSCKASGGTVNNYAINWVRQAPGQGLEWMGGIVPIFGTPNYAQKFQGRVTITADESTSTAYMELSSLRSEDTAVYYCAKVSLTLPIAAAPRFWFDSWGQGTLVTVSS

SEQ ID NO: 250 - protein, 109 aa, Artificial Sequence
  Synthetic
EIVMTQSPATLSVSPGERATLSCRASQSVSSHLAWYQQKPGQAPRLLIYGASTRATGIPARFSGSGSGTEFTLTISSLQSEDFAVYYCQQYHNWPPALTFGGGTKVEIK

SEQ ID NO: 251 - protein, 126 aa, Artificial Sequence
  Synthetic
QVQLVQSGVEVKKPGSSVKVSCKASGGTFTDYAFSWVRQAPGQGLEWMGGIVPIFATPDYAEKFRGRVTITADESTSTAYMELSTLKSEDTAVYYCARASLTLPIRAAPRFWFDAWGQGTLVTVSS

SEQ ID NO: 252 - protein, 109 aa, Artificial Sequence
  Synthetic
EIVMTQSPATLSVSPGERATLSCRASQGVSTHLAWYQQKPGQAPRLLIYGASTRATGIPARFSGSGSGTEFTLTISSLQSEDFAVYYCQQYHKWPPALTFGGGTKVEIK

SEQ ID NO: 253 - protein, 128 aa, Artificial Sequence
  Synthetic
QVQLQESGPGLVRPSQTLSLTCTVSGGSIGSGAYWSWIRQHPAKGLEWIGYVYYSGSTFYNPSLETRVSISVDISKDQFSLELTSVTVADTAVYYCAREKIEVVSIEMRPHYYGIDVWGQGTTVTVSS

SEQ ID NO: 254 - protein, 108 aa, Artificial Sequence
  Synthetic
EIVMTQSPATLSVSPGERATLSCRASQSISSNLAWYQQKPGQPPRLLIYGASTRATGIPARFSGSGSGTEFTLTISSLQSEDIAVYYCQHYNNWPPWTFGQGTKVDIK

SEQ ID NO: 255 - protein, 122 aa, Artificial Sequence
  Synthetic
QVQLQESGPRLVKPSGSLSLTCAVSGGSLSSSNWWNWVRQSPEKGLEWIGEIFHSGSTYYNPSLKSRVTISVDKSKNHFSLNLRSVTAADTAVYYCAGSYSNYIGGVWFDPWGQGTLVTVSS

SEQ ID NO: 256 - protein, 107 aa, Artificial Sequence
  Synthetic
DIQLTQSPSFLSASVGDRVTITCRASQGISSYLAWYQQKPGKAPKLLIYAASTLQSGVPSRFSGSGSGTEFTLTISSLQPEDFATYYCQQLNSYPLTFGGGTKVEIK

SEQ ID NO: 257 - protein, 122 aa, Artificial Sequence
  Synthetic
QVQLQESGPGLVKPSGTLSLTCAVSGGPISSNHWWSWVRQPPGKGLEWIGEVYRNGNTNYHPSLKSRVTMSIDNSKNQFSLSLTSVTAADTAVYYCARGGDLAMGPEYLDFWGQGTLVTVSS

SEQ ID NO: 258 - protein, 110 aa, Artificial Sequence
  Synthetic
QSALTQPASVSGSPGQSITISCTGTSSDVGANNYVSWYQQHPGKAPKLMIYDVINRPSGVSDRFSGSKSGNTASLTISGLQAEDEADYYCSSFSTSSTLLFGGGTKLTVL

SEQ ID NO: 259 - protein, 122 aa, Artificial Sequence
  Synthetic
QVQLVESGGGVVQPGRSLRLLCAASGFTFNTHGMHWVRQAPGKGLEWVAVIWFDGSNKYYADSVKGRFTISRDNSTNTLYLQMNSLRAEDTAVYYCARVYGGLPYYYAIDVWGQGTTVTVSS

SEQ ID NO: 260 - protein, 111 aa, Artificial Sequence
  Synthetic
QSVLTQPPSVSGAPGQRVTISCAGSSSNIGAGYGVHWSQQLPGRPPKLLIYGDSNRPSGVPDRFSGSNSGTSASLAITGLQAEDEAVYYCQSYDRSLRAWVFGGGTKLSVL

SEQ ID NO: 261 - protein, 120 aa, Artificial Sequence
  Synthetic
QVQLVESGGGVVQPGTPLRLSCAASGFTFSSYAMHWVRQAPGKGLEWVAMISYDGGNKYYADSVKGRFTISRDNSKNTLFLQMNSLRGEDTAVYYCARSFSIRIGHKDNWGQGTLVTVSS

SEQ ID NO: 262 - protein, 111 aa, Artificial Sequence
  Synthetic
NFMLTQPHSVSESPGKTVTISCTGSSGSIANNYVQWYQQRPGSAPTPVIYEDDQRPSGVPDRFSGSIDSSSNSASLSISGLKTEDEADYYCQSYDSTNFWVFGGGTKLTVL

SEQ ID NO: 263 - protein, 122 aa, Artificial Sequence
  Synthetic
QVQLVQSGAEVKKPGASVKISCKASGYSFSNYYIHWVRQAPGQGLEWMGIINPSGNSISYAQKFQGRVTMTGDTSTSTVYMELSSLRSEDTAVYYCARSVFPVPAAGGCDYWGQGTLVTVSS

SEQ ID NO: 264 - protein, 108 aa, Artificial Sequence
  Synthetic
DIQMTQSPSSLSASVGDRVTITCRASQSITTSLNWYQQKPGKAPKLLIYSASTLESGVPSRFSGSGSGTDFTLTISSLQPEDFATYYCQQTYRAPPYTFGQGTKLEIK

SEQ ID NO: 265 - protein, 122 aa, Artificial Sequence
  Synthetic
QVQLVQSGAELKKPGASVKVSCKASGYTFSTYYIHWVRQAPGQGLEWMGIINPEAGSTSYAQKFQGRVTMTTDTSTSTVYMELISLRSQDTAIYYCARDAVGVPAINSLEYWGQGTLVTVSS

SEQ ID NO: 266 - protein, 109 aa, Artificial Sequence
  Synthetic
EIVLTQSPATLSLSPGERATLSCRASQSISSYLAWYQQKPGQAPRLLIYDASNRATDISARFSGSGSGTDFTLTISSLEPEDFAVYYCQHRSNWPPSFTFGGGTKVEIK

SEQ ID NO: 267 - protein, 122 aa, Artificial Sequence
  Synthetic
QVQLVQSGAEVKTPGASVKVSCQASGDTFTSQYLHWVRQAPGQGLEWMGIINPTAGSTTYAQKFQGRVTMTRDTSTSTVYMELRSLRSEDMAVYYCARGGFIPMVRGFIDHWGQGTLVTVSS

SEQ ID NO: 268 - protein, 110 aa, Artificial Sequence
  Synthetic
QSALTQPASVSGSPGQSITISCTGTSSDVGGYNYVSWYQQHPGKAPKLMIYDVSNRPSGVSTRFSGSKSGNTASLTISGLQAEDEADYYCSSPTSSNTHVFGTGTKVTVL

SEQ ID NO: 269 - protein, 122 aa, Artificial Sequence
  Synthetic
QVQLVQSGAEMKKPGASVKISCKASGDTFTTNYFHWVRQAPGQGLEWMGIINPSAGSTTYAQRFQGRVTMTGDSSTNTVYLELRSLRSEDTAMYFCAKGSYIPAMRSSFDPWGQGTLVTVSS

SEQ ID NO: 270 - protein, 109 aa, Artificial Sequence
  Synthetic
EIVLTQSPGTLSLSPGERATLSCRASQSVSHRYLAWYQQKPGQAPRLLIDGASNRATGIPDRFSGSGSGTDFTLTISRLEPEDFGVYYCQQYGSSPPFTFGQGTKLEIK

SEQ ID NO: 271 - protein, 120 aa, Artificial Sequence
  Synthetic
QVQLVESGGGVVQPGRSLRLSCAASGFTFSDYAMHWVRQAPGKGLEWVAMISYDGNSQYYADSVKGRFTISRDNSKNTLYLQMNILRPEDTAVYYCARTFSIRIGHHDYWGQGTLVTVSS

SEQ ID NO: 272 - protein, 111 aa, Artificial Sequence
  Synthetic
NFMLTQPHSVSESPGKTVTISCTGSSGSIASNYVHWYQQRPGSAPTTVIFEDNQRPSGVPDRFSGSIDSSSNSASLTISGLKTEDEADYYCQSYDSSSFWVFGGGTKLTVL

SEQ ID NO: 273 - protein, 117 aa, Artificial Sequence
  Synthetic
EVQLVESGGGLIQPGGSLRLSCAASGFIVSRNYMSWVRQAPGKGLEWVSIIYSGGSTFYADSVKGRFTISRDNSKNTVYLQMNSLRAEDTAVYYCARDYGDFYFDYWGQGTLVTVSS

SEQ ID NO: 274 - protein, 108 aa, Artificial Sequence
  Synthetic
EIVLTQSPGTLSLSPGERATLSCRASQSVSSSYLAWYQQKPGQAPRLLIFDVSSRATGIPDRFSGSGSGTDFTLTISRLEPEDFAVYYCQQYGSSPRTFGQGTKVEIK

SEQ ID NO: 275 - protein, 123 aa, Artificial Sequence
  Synthetic
QVQLQQWGAGLLKPSETLSLTCAVNGGSLSLYYWSWIRQSPGKGLEWIGEINHFGGSDYKPSLKSRVSISVDTSTNQFSLKLSSVTAADTAVYYCARKPLLHSNISPGAFDIWGQGTMVTVSS

SEQ ID NO: 276 - protein, 107 aa, Artificial Sequence
  Synthetic
EIVLTQSPGTLSLSPGERATLSCRASQSVAGSYLAWYQQKPGQAPRLLIYGASSRATGVPDRISGSGSGTDFTLTISRLEPEDFAVYYCQQYTNTPRTFGGGTKVEI

SEQ ID NO: 277 - protein, 122 aa, Artificial Sequence
  Synthetic
QVQLQESGPGLVTPSQTLSLTCSVSGGSIHSRDFYWGWIRQHPGKGLEWIGHIYYTGNTYYNPSLKSRVTISADTSKNQFSLKLSSVTAADTAVYYCARATVVITLHWFDPWGQGTLVTVSS

SEQ ID NO: 278 - protein, 111 aa, Artificial Sequence
  Synthetic
NFMLTQPHSVSESPGKTVTISCTGSGGSIASNYVQWYQQRPGSAPTTVIYEDNERPSGVPDRFSGSIDSSSNSASLTISGVKTEDEADYFCQSYDVGNPVIFGGGTKLTVL

SEQ ID NO: 279 - protein, 120 aa, Artificial Sequence
  Synthetic
EVQLVESGGGLIKPGRSLRLSCTASGFTFGDYAMTWFRQAPGKGLEWVGFIRSKAYGGTTGYAASVKYRFTISRDDSKSIVYLQMDSLKTEDTAVYYCTRWDGWSQHDYWGQGTLVTVSS

SEQ ID NO: 280 - protein, 111 aa, Artificial Sequence
  Synthetic
DIVMTQSPLSLSVTPGEPASISCRSSQSLLHSNGINYFDWYLQKPGQSPQLLIYLGSNRASGVPDRFSGSGSGTDFTLKISRVEAEDVGVYYCMQVLQIPYTFGQGTKLEI

SEQ ID NO: 281 - protein, 122 aa, Artificial Sequence
  Synthetic
QVQLQESGPGLVKPSETLSLTCTVSGGSITSYYWTWIRQSPGKGLEWIGYIYYIGSTNYNPSLKSRLTISLATSKNQFSLRLNSVTAADTAVYYCASYYNDTSGYSYGLDVWGQGTTVTVSS

SEQ ID NO: 282 - protein, 107 aa, Artificial Sequence
  Synthetic
DIQMTQSPSSLSAFVGDRVTITCRAGQSISSYLHWYQQKPGKAPKLLIYATSTLQSGVPSRFSGRGSGTDFTLTISGLQPEDFATYYCQQSYSTPQTFGQGTKVEIK

SEQ ID NO: 283 - protein, 123 aa, Artificial Sequence
  Synthetic
EVQLVQSGAEVKKPGESLKISCKASGYSFTIYWIGWVRQMPGKGLEWMGIIYPGESETRYSPSFQGQVTISADKSISTAYLQWRSLKASDTAMYYCARGGPPGGVKLELTDYWGQGTLVTVSS

SEQ ID NO: 284 - protein, 111 aa, Artificial Sequence
  Synthetic
QSVLTQPPSASGTPGQRVTISCSGSSSNIGDNTVNWYQQLPGTAPKLLIYNNIQRPSGVPDRFSGSKSGTSASLAISGLQSEDEADYYCASWDDSLNGPVVFGGGTKLTVL

SEQ ID NO: 285 - protein, 122 aa, Artificial Sequence
  Synthetic
QVQLVQSGAEVKKPGASVKVSCRASGYTFPNYDLNWVRQATGQGLEWMGWMNPNSGNTGYAQKFQGRITMTRITSISTAYMELSSLRSEDTAVYYCARGRANWNSNFLLDSWGQGTLVTVSS

SEQ ID NO: 286 - protein, 111 aa, Artificial Sequence
  Synthetic
QSALTQPASVSGSPGQSITISCTGTSSDVGGYNLVSWYQQYPGNVPKLMIYEDAKRPSGVSNRFSGSKSANTASLTISGLQAEDEADYYCCSYAGSSTRYVFGTGTKVTVL

SEQ ID NO: 287 - protein, 122 aa, Artificial Sequence
  Synthetic
QVQLVQSGAAVKKPGASVKVSCKASGYTFTSYDINWVRQAPGQGLEWMGWMNPNSGNTGFAQRFQGRATLSRDTSITTAYMELTTLRSEDTAVYYCARGRANYNSKFLLDNWGQGTLVTVSS

SEQ ID NO: 288 - protein, 111 aa, Artificial Sequence
  Synthetic
QSALTQPASVSGSPGQSITISCTGTSSDVGSYNLVSWYQQHPGTAPKLMIYEGSKRPSGVSDRFSGYKSGNTASLTISGLQADDEADYYCCSFAGSTTRYVFGTGTRVTVL

SEQ ID NO: 289 - protein, 122 aa, Artificial Sequence
  Synthetic
QVQLVESGGGVVQPGGSLRLSCAASAFTFSSYAMHWIRQSPGKGLEWVAVISSDGSSKFYADSVKGRFTISRDNSKNTLYLQMNSLSAEDTAVYYCARDLENVLIEVALQDWGQGTLVTVSS

SEQ ID NO: 290 - protein, 108 aa, Artificial Sequence
  Synthetic
DIQMTQSPSSLSASVGDRVTITCRASQSINSYLNWYQQKPGKAPKLLIYAASSLHSGVPSRFSGSGSGTDFTLTISSLQPEDFATYYCQQSYTTLALTFGGGTKVEIK

SEQ ID NO: 291 - protein, 122 aa, Artificial Sequence
  Synthetic
QVQLVESGGGVVQPGRSLRLSCAASGFSFSTYTMHWVRQTPDKGLEWVAVISDDGKNKYYADSMKGRFTISRDNSKNTLYLQMSSLRPEDTAVYYCARDLENVMIEVALESWGQGTLVTVSS

SEQ ID NO: 292 - protein, 108 aa, Artificial Sequence
  Synthetic
DIQMTQSPSSLSASVGDRVTITCRASQSISSYLNWYQQKPGKAPKLLIYAASSLQSGVPSRFSGSGSGTDFTLTISSLQPEDFATYYCQQSYTTLALTFGGGTKVEIK

SEQ ID NO: 293 - protein, 123 aa, Artificial Sequence
  Synthetic
EVQLVESGGVVVQPGGSLRLSCAASGFTFDDYSMHWVRQVPGKGLEWIAVIFWDGTSTYYADSVKGRFTISRDNSKKSLYLQMNSLRSEDTALYYCAKDSEDCSSTSCYVDHWGQGTLVTVSS

SEQ ID NO: 294 - protein, 113 aa, Artificial Sequence
  Synthetic
DIVMTQSPDSLAVSLGERATINCKSSQSVFYISNNKNYLAWYQQKPGQPPKLLIYWASTRESGVPDRFSGGGSGTDFTLTISSLQAEDVAVYYCQQYYNTPYTFGQGTKLEIK

SEQ ID NO: 295 - protein, 124 aa, Artificial Sequence
  Synthetic
QVQLQESGPGLVKPSQTLSLTCTVSGGSITSGDYYWTWIRQPPGKGLEWIGYIYYSGNTYYNLSLRSRITISEDTSKNQFSLKLRSVTAADTAVYYCARAMITFGGVIVVLDYWGQGTLVTVSS

SEQ ID NO: 296 - protein, 111 aa, Artificial Sequence
  Synthetic
QSALTQPPSASGSPGQSVTISCTGTSTDVGGYNFVSWYQQHPGKAPKLMIYEVSKRPSGVPDRFSGSKSGNTASLTVSGLQAEDEADYYCSSYAGSNILYVFGTGTKVTVL

SEQ ID NO: 297 - protein, 124 aa, Artificial Sequence
  Synthetic
QVQLQESGPGLVKPSQTLSLTCTVSGGSISSGDYYWSWIRQPPGKGLEWIGYIYYSDSTYYNPSLRTRVTISVDTSKNQFSLKLTSVTAADTAVYYCARAMITFGGVIVLYDYWGQGTLVTVSS

SEQ ID NO: 298 - protein, 111 aa, Artificial Sequence
  Synthetic
QSALTQPPSASGSPGQSVTISCTGTSSDVGGYNYVSWYQQHPGKAPKLMIYEVTKRPSGVPARFSGSKSGNTASLTVSGLQAEDEADYYCSSYAGSILLYVFGTGTKVTVL

SEQ ID NO: 299 - protein, 122 aa, Artificial Sequence
  Synthetic
EVQLVESGGGLVQPGGSLRLSCAASGFTFSNYDMHWVRQATGRGLEWVSTIGTAGDTYYPGSVKGRFTISRENAKNSLYLQMNSLRAGDTALYYCARVRYDSSGYFWSLDYWGQGTLVTVSS

SEQ ID NO: 300 - protein, 108 aa, Artificial Sequence
  Synthetic
DIQMTQSPSSLSASVGDRVTITCRASQSISRYLNWYQQKPGKAPKLLIYAASSLQSGVPSRFSGSGSGTDFTLTISGLQPEDFATYYCQQSYSTPQYTFGQGTKLEIK

SEQ ID NO: 301 - protein, 122 aa, Artificial Sequence
  Synthetic
EVQLVESGGGLVQPGGSLRLSCAASGFTFSNYDMHWVRQATGKGLDWVSTIGTAGDTYYPGSVKGRFTISRENAKNSLYLQMNSLRAGDTAVYYCARVRFDTSGYFWSLDYWGQGTLVTVSS

SEQ ID NO: 302 - protein, 108 aa, Artificial Sequence
  Synthetic
DIQMTQSPSSLSASVGDRVTITCRASQSISSYLNWYQQKPGKAPKLLIYAASSLQSGVPSRFSGSGSGTDFTLTISSLQPEDFATYYCQQSYSNPQYTFGQGTKLEIK

SEQ ID NO: 303 - protein, 121 aa, Artificial Sequence
  Synthetic
QVQLVESGGGLVKPGGSLRLSCTASGFTFSDYYMTWLRQAPGKGLEWVSYISSTSPYTSYADSVKGRFTISRDNARNSVYLQMNSLRAEDTAIYYCARVPPPQRLHPFDVWGQGTMVTVSS

SEQ ID NO: 304 - protein, 106 aa, Artificial Sequence
  Synthetic
DIQMTQSPSTLSASVGDRVTITCRASQSISSWLAWYQQKPGKAPKLLIYQASSLESGVPSRFSGSGSGTDFTLTISSLQPDDFATYYCQQYFRYSWTFGQGTKVEI

SEQ ID NO: 305 - protein, 121 aa, Artificial Sequence
  Synthetic
QVQLVESGGGLVKPGGSLRLSCTASGFTFSDYYMTWLRQAPGKGLEWVSYISSTSPYTSYADSVKGRFTISRDNARNSVYLQMNSLRAEDTAVYYCARVPPPQRLHPFDVWGQGTMVTVSS

SEQ ID NO: 306 - protein, 106 aa, Artificial Sequence
  Synthetic
DIQMTQSPSTLSASVGDRVTITCRASQSISSWLAWYQQKPGKAPKLLIFKASSLESGVPSRFSGSGSGTDFTLTISSLQPDDFATYYCQQYFRYSWTFGQGTKVEI

SEQ ID NO: 307 - protein, 122 aa, Artificial Sequence
  Synthetic
QLQLQESGPGLVKPSETLSLTCAVSGGSISNSPFYWGWIRQPPGKGLECIGSIYYSGSTYYNPSLKSRVTISVDTSKKQFSLKLSSVTAADTAVYYCARHFADGSGRVVDSWGQGILVTVSS

SEQ ID NO: 308 - protein, 108 aa, Artificial Sequence
  Synthetic
EIVLTQSPATLSLSPGERATLSCRASQSVSSYLAWYQQKPGQAPSLLIYDVSNRATGIPARFSGSGSGTDFTLTISSLEPEDFAVYYCQQRINWPLYTFGQGTKLEIK

SEQ ID NO: 309 - protein, 122 aa, Artificial Sequence
  Synthetic
QLQLQESGPGLVKPSETLSLTCAVSGGSISNSPFYWAWIRQPPGKGLECIGSIYYTGSTYYNPSLKSRVTISVDTSTKQFSLKLRSVTAADTAVYYCARHFADGSGRVVDYWGQGTLVTVSS

SEQ ID NO: 310 - protein, 108 aa, Artificial Sequence
  Synthetic
EIVLTQSPATLSLSPGERATLSCRASQSVTTYLAWYQQKPGQAPRLLIYDVSSRATGIPARFSGSGSGTDFTLTISSLEPEDFAVYYCQQRSNWPLYTFGQGTKLEIK

SEQ ID NO: 311 - protein, 119 aa, Artificial Sequence
  Synthetic
QVQLVESGGGLVKPGGSLRLSCAGSGFTFTDYYMAWIRQAPGKGLEWVSYISTSDRFINYADSVKGRFTISRDDAKNSLYLQMNSLRAEDTAVYYCARDGGGYDRFDHWGQGTLVTVSS

SEQ ID NO: 312 - protein, 107 aa, Artificial Sequence
  Synthetic
DIQMTQSPSSLSASVGDRVTITCQASQDISNLLNWYQQKAGKAPKLLIYDASNLETGVPSRFSGSGSGTDFTFTISSLQPEDIATYYCLQYDNLPLTFGQGTKLEIK

SEQ ID NO: 313 - protein, 119 aa, Artificial Sequence
  Synthetic
QVQLVESGGGLVKPGGSLRLSCAASGFTFSDYHMTWIRQAPGKGLEWVSYISNRSTYRNYADSVKGRFTISRDNAKNSLYLQMNSLRAEDTAVYYCARDGGAYDRFDYWGQGTLVTVSS

SEQ ID NO: 314 - protein, 107 aa, Artificial Sequence
  Synthetic
DIQMTQSPSSLSASVGDRVTITCQASQDIKKFLNWYQQKPGKAPKLLIYDASNLETGVPSRFSGSGSGTDLTFTISSLQPEDIATYYCQQYDNLPLTFGQGTKLEIK

SEQ ID NO: 315 - protein, 120 aa, Artificial Sequence
  Synthetic
QVQLVESGGGVVQPGRSLRLSCAASGFTFSSYGMHWVRQAPGKGLEWVAVISDDGSNKYYADSVKGRFTISRDNSKNTLYLQMNSLRAEDTAVYYCAKSWWLSENWFDPWGQGTLVTVSS

SEQ ID NO: 316 - protein, 107 aa, Artificial Sequence
  Synthetic
EIVMTQSPATLSVSPGERATLSCRASQSVSSNLAWYQQKPGQAPRLLIYGASTRATGIPARFSGTGSGTEFTLTISSLQSEDFAVYYCQQYNNWPLTFGGGTKVEIK

SEQ ID NO: 317 - protein, 120 aa, Artificial Sequence
  Synthetic
QVQLVESGGGVVQPGRSLRLSCAASGFTFSNYGLHWVRQAPGKGLEWVAVTSDDGNRKYYADSVKGRFTISRDDSKNTLYLQMNNLRTEDTAVYYCAKSWWLSENWFDPWGQGTLVTVSS

SEQ ID NO: 318 - protein, 107 aa, Artificial Sequence
  Synthetic
EIVMTQSPATLSVSPGERATLSCRASQSVRSNLAWYQQRPGQAPRLLIYGAFTRATGIPARFSVSGSGTEFTLTIDSLQSEDFAVYYCQQYNNWPLTFGGGTKVEIK

SEQ ID NO: 319 - protein, 121 aa, Artificial Sequence
  Synthetic
QVQLVESGGGVVQPGRSLRLSCAASGFGLITYSMHWVRQAPGKGLEWVGLISFDGNTTYYADSVRGRFTISRDNLANILYLQMNSLRPDDTALYYCARDKRGVIRGLLNFWGQGSLVTVSS

SEQ ID NO: 320 - protein, 112 aa, Artificial Sequence
  Synthetic
DIVMTQSPDSLAVSLGERATINCKSSQSLLPSSNSNNYLAWYQQKSGQPPNLLIYWASTRESGVPDRFSGSGSETDFSLTISNLQAEDVAVYYCQQYYNTPHTFGGGTKVEI

SEQ ID NO: 321 - protein, 117 aa, Artificial Sequence
  Synthetic
QVQLVESGGGVVQPGRSLRLSCVASGFTFSYFDMHWVRQAPGKGLEWVALISHDGSTTFYGDSARGRFTISRDNSRNTLDLQMNSLRPEDTAVYFCAKPVDAAMFDFWGQGTLVTVS

SEQ ID NO: 322 - protein, 109 aa, Artificial Sequence
  Synthetic
SYELTQPPSVSVAPGKTARITCGGNNIGSKSVHWYQQRPGQAPVLVIYYDSDRPSGIPERFSGSNSGNTATLTISRVEAGDEADFYCQVWDRSTNHLVVFGGGTQLTVL

SEQ ID NO: 323 - protein, 118 aa, Artificial Sequence
  Synthetic
QVQLVESGGGVVQPGRSLRLSCAASGFTFSFFDMHWVRQAPGKGLEWVADISYDGSNQYYGDSVKGRFTISRDNSKSTLYLQMNSLRAEDTAVYYCAKPVDTAMFDSWGQGTLVTVSS

SEQ ID NO: 324 - protein, 109 aa, Artificial Sequence
  Synthetic
SYELTQPPSVSVAPGETARITCGGNNIGHKSVHWYQQQPGQAPVLVIYYDSERPSGIPERFSGSNSGNTATLTISRVEAGDEADYHCQVWDGGNDHLVIFGGGTKLTVL

SEQ ID NO: 325 - protein, 117 aa, Artificial Sequence
  Synthetic
EVQLVESGGGLIQPGGSLRLSCAASGFTVSSNYMTWVRQAPGKGLEWVSVIYSGGTTYYADSVKGRFTISRDNSKNTLYLQMNSLRAEDTAVYYCARDLVVWGMDVWGQGTTVTVSS

SEQ ID NO: 326 - protein, 107 aa, Artificial Sequence
  Synthetic
DIQLTQSPSFLSASVGDRVTITCRASQGISSYLAWYQQKPGKAPKLLIYAASTLQSGVPSRFSGSGSGTEFTLTISSLQPEDFATYYCQLLNSYPYTFGQGTKLEIK

SEQ ID NO: 327 - protein, 117 aa, Artificial Sequence
  Synthetic
EVQLVESGGGLFQPGGSLRLACAASGITVSSNYMSWVRQPPGKGLEWVSVIYAGGSTFYADSVKGRLTISRDNSKNTLYLQINSLRAEDTAVYYCARDLVVWGMDVWGQGTTVTVSS

SEQ ID NO: 328 - protein, 107 aa, Artificial Sequence
  Synthetic
DIQLTQSPSFLSASVGDRVTITCRASQGISSYLAWYQQKPGKAPKLLIYAASTLQSGVPSRFSGSGSGTEFTLTISSLQPEDFATYYCQQLNTYPYTFGQGTKLEIK

SEQ ID NO: 329 - protein, 125 aa, Artificial Sequence
  Synthetic
QVQLVESGGGVVQPGRSLRLSCAASGFSFSTYGMHWVRQAPGKGLEWVAVISFDGSQKYYGDSVKGRFTISRDNPKNTLDLQMNSLRAEDTAVYYCAKVVVRGVIISLYYGMDVWGQGTTVTVSS

SEQ ID NO: 330 - protein, 106 aa, Artificial Sequence
  Synthetic
SYELTQPPSVSVSPGQTASITCSGDKLGDKSACWYQQKPGQSPVLVIYQDNKRPSGIPERFSGSNSGNTATLTISGTQAMDEADYYCQAWDSSTAVFGGGTKLTVL

SEQ ID NO: 331 - protein, 125 aa, Artificial Sequence
  Synthetic
QVQLVESGGSVVQPGKSLRLSCAGSGFAFSTYGMHWVRQAPGKGLEWVAVISSDGGNKYYADSVKGRFTISRDNYENTLYLQMNSLGAEDTAVYYCAKVALRGVFISLYYGMDVWGQGTTVTVSS

SEQ ID NO: 332 - protein, 105 aa, Artificial Sequence
  Synthetic
SYELTQPPSVSVTPGQTASITCSGDKLGDKYACWFLQKPGQSPLLVIYQDTKRPSGIPDRLSGSKSGNTATLTISGTQAMDEADYYCQTWDSSAVVFGGGTKLTV

SEQ ID NO: 333 - protein, 125 aa, Artificial Sequence
  Synthetic
QVQLVQSGAEVKKPGASVKVSCKASGYTFTDYYIHWVRQAPGQGLEWMGWINPNSGGTNYAQKFQGRVTMTRDTSISTAYMELSRLRSDDTAVYYCARDVIVSMVRGVIFRMDVWGQGTTVTVSS

SEQ ID NO: 334 - protein, 110 aa, Artificial Sequence
  Synthetic
QSVLTQPPSASGTPGQRVTISCSGSSSNIGSNTVNWYQQLPGTAPKLLIYSNNQRPSGVPDRFSVSKSGTSASLAISGLQSEDEADYYCAAWDDSLNGVVFGGGTKLTVL

SEQ ID NO: 335 - protein, 125 aa, Artificial Sequence
  Synthetic
QVQLVQSGAEVKKPGASVKVSCKASGYTFTDYYIHWVRQAPGQGLEWMGWINPNSGGTNYAQKFQGRVTMTRDTSISTAYMDLSRLRSDDTAVYYCARDVIITMGRGVVFRMDVWGQGTTVTVSS

SEQ ID NO: 336 - protein, 110 aa, Artificial Sequence
  Synthetic
QSVLTQPPSASGTPGQRVTISCSGSSSNIGNNTVNWYQQFPGTAPKLLIHSNNQRPSGVPDRFSGSKSGTSASLAISGLQSEDEADYYCAAWDDSLNGVVFGGGTKLTVL

SEQ ID NO: 337 - protein, 125 aa, Artificial Sequence
  Synthetic
QVQLVESGGGVVQPGRSLRLSCAATGFTFSSYGMHWVRQAPGKGLEWVALIWYDGSNQYYVDSVKGRFTISRDNSKKTLYLQMNSLRVEDTAVYYCARDFSNSDMVTLSDAFDIWGQGTMVTVSS

SEQ ID NO: 338 - protein, 111 aa, Artificial Sequence
  Synthetic
DIQLTQSPSFLSASVGDRVTIACRASQGISSYSSYLAWYQQKPGKAPKLLIYAASTLQSGVPSRFSGSGSGTEFTLTISSLQPEDFATYYCQQLNSYPLFTFGPGTKVDIK

SEQ ID NO: 339 - protein, 117 aa, Artificial Sequence
  Synthetic
EVQLVESGGGLIQPGGSLRLSCAASGFTVSSNYMSWVRQAPGKGLEWVSVIYSGGSTFYADSVKGRFTISRDNSKNTLYLQMNSLRAEDTAVYYCARDLGTGLFDYWGQGTLVTVSS

SEQ ID NO: 340 - protein, 108 aa, Artificial Sequence
  Synthetic
DIQLTQSPSFLSASVGDRVTITCRASQGISSYLAWYQQKPGKAPKLLIYAASTLQSGVPSRFSGSGSGTEFTLTISSLQPEDFATYYCQQLDSYPPGTFGPGTKVDIK

SEQ ID NO: 341 - protein, 117 aa, Artificial Sequence
  Synthetic
EVQLVESGGGLIQPGGSLRLSCAASELTVSSNYMSWVRQAPGKGLEWVSVIYPGGSTFYADSVKGRFTISRDNSKNTLYLQMNSLRAEDTAVYYCARDLGTGLFDYWGQGTLVTVSS

SEQ ID NO: 342 - protein, 108 aa, Artificial Sequence
  Synthetic
DIQLTQSPSFLSASVGDRVTITCRASQGISSYLAWYQQKPGKAPKLLIYAASTLQSGVPSRFSGSGSGTEFTLTISSLQPEDFATYFCQLLNSNPPGTFGPGTKVDIK

SEQ ID NO: 343 - protein, 129 aa, Artificial Sequence
  Synthetic
QVQLVESGGGVVQPGRSLRLSCAASGFTFRSHAMHWVRQAPGKGLEWVAIISSDGFNKYYADSVKGRFTISRDNSKNTLYVHMNSLRVEDTAIYYCASGLLWFETREISGAPDYGMAVWGQGATVTVSS

SEQ ID NO: 344 - protein, 107 aa, Artificial Sequence
  Synthetic
DIQMTQSPSSLSASVGDRVTITCRASQNISNFLNWYQQKPGKAPKLLIYAASSLQSGVPSRYSGSGSGTDFTLTISSLQAEDFATYYCQQSYSTPLTFGGGTKVEIK

SEQ ID NO: 345 - protein, 129 aa, Artificial Sequence
  Synthetic
QVQLVESGGGVVQPGRSLRLSCAASGFTFSSYAMHWVRQAPGKGLESVALISHDGSNKYHADSVKGRLTISRDTSKNTLYLQMDSLRPEDTAVYYCASGLLWFETAGGSGAPDYGMAVWGQGTTVTVSS

SEQ ID NO: 346 - protein, 107 aa, Artificial Sequence
  Synthetic
DIQMTQSPSSLSASVGDRVTITCRASQSISTYLNWYQQKPGRAPKFLIYAASSLQSGVPSRFSGSGSGTDFTLIISGLQPEDFATYFCQQSYNTPLTFGGGTKVEIK

SEQ ID NO: 347 - protein, 124 aa, Artificial Sequence
  Synthetic
QVQLQESGSGLVKPSQTLSLTCAVSGGSASSGGYSWSWIRQPPGKGLEWIGYIYHSGSTYYNPSLKSRVTISLDRTKKQFSLKLSSVTAADTAVYYCARFCLSGSHYLFAFDIWGPGTMVTVSS

SEQ ID NO: 348 - protein, 109 aa, Artificial Sequence
  Synthetic
QSALTQPASVSGSPGQSITISCTATSSDVGGYNFVSWYQQYPGKVPKLLIYDVGNRPSGVSNRFSGSKSGNTASLTISGLQAEDEADYYCSSYTNSSTFFGGGTKLTVL

SEQ ID NO: 349 - protein, 124 aa, Artificial Sequence
  Synthetic
QVQLVQSGAEVKKPGSSVKVSCKASGGTSRSYPISWVRQAPGQGLEWMGRIIPIVGTANYAQRFQGRVTITADESTGTAYMELSSLRSEDTAVYYCARNRGYSDYGSVYYFDYWGQGTLVTVSS

SEQ ID NO: 350 - protein, 110 aa, Artificial Sequence
  Synthetic
QSVLTQPPSVSGAPGQRVTISCTGSSSNIGAGYDVHWYQQLPGAAPKLLIYRNINRPSGVPDRFSGSKSGTSASLAITGLQADDEADYYCQSYDSSLSGSVFGGGTKLTV

SEQ ID NO: 351 - protein, 122 aa, Artificial Sequence
  Synthetic
QVQLVESGGGVVQPGRSLRLSCAASGFTFSSYVMHWVRQAPGKGLEWVAIISSDGNTKYYADSVKGRFTISRDNSKNTLYLQMNSVRTDDTAVYYCARDGTTMTPTDLLTDWGQGTLVTVSS

SEQ ID NO: 352 - protein, 108 aa, Artificial Sequence
  Synthetic
DIQMTQSPSSLSASVGDRVSITCRASQRISSYLNWYQQKPGKAPKLLIYAASSLQSGVPSRFSGSGSGTDFTLTISSLQPEDFATYYCQQSYSTPPLTFGPGTKVDIK

SEQ ID NO: 353 - protein, 122 aa, Artificial Sequence
  Synthetic
QVQLVESGGGVVQPGRSLRLSCAASGFPFSSFGMHWVRQAPGRGLEWVALILYDGDNKYYADSVKGRFTISRDNSKNTLYLQMNSLRAEDTAVYYCAKDIGGGSSPPFFDYWGQGTLVTVSS

SEQ ID NO: 354 - protein, 108 aa, Artificial Sequence
  Synthetic
SYELTQAPSVSLAPGKTARITCGENNIGSKSVHWYQQKPGQAPVLVIYYDSDRPSGIPERFSGSNSGNTATLTISRVEAGDEADYYCQVWDSSSDHVMFGGGTKLTVL

SEQ ID NO: 355 - protein, 123 aa, Artificial Sequence
  Synthetic
QVQLVESGGGVVQPGRSLRLSCAASGFTFSSYGMHWVRQAPGKGLEWVAVISYDGSYKYYADSVKGRFTISRDNSKNTLYLQMNSLRAEDTAVYYCAKGSGSQLYYYYGMDVWGQGTTVTVSS

SEQ ID NO: 356 - protein, 108 aa, Artificial Sequence
  Synthetic
DIQMTQSPSSLSASVGDRVTITCRASQSISSYLNWYQQKPGKAPKLLIYAASSLQSGVPSRFSGSGSGTDFTLTISSLQPEDFATYYCQQSYSTPHSSFGPGTKVDIK

SEQ ID NO: 357 - protein, 121 aa, Artificial Sequence
  Synthetic
QVQLVQSGAEVKKPGASVRISCKASGYTFTNYYMHWVRQAPGQGLEWMGIINPSGGSTTYAPKFQARVTMTRDTSTSTVYMELSSLRSDDTAVYYCARDYVLVPARSGMDVWGQGTTVTVS

SEQ ID NO: 358 - protein, 107 aa, Artificial Sequence
  Synthetic
EIVLTQSPATLSLSPGERATLSCRASQSVSSYLAWYQQKPGQAPRLLIYDASNRATGIPARFSGSGSGTDFTLTISSLEPEDFAIYYCQQRSNWPYTFGQGTKLEIK

SEQ ID NO: 359 - protein, 122 aa, Artificial Sequence
  Synthetic
QVQLVQSGAEVKKPGASVKVSCKASGYTFTNYYIHWVRQAPGQGLEWMGIINPDGDSTSYVQKFQGRVTMTRDTSTSTVYMELSSLRSEDTAVYYCARDLVFVPATSAMDVWGKGTTVTVSS

SEQ ID NO: 360 - protein, 107 aa, Artificial Sequence
  Synthetic
EIVLTQSPATLSLSPGERATLSCRASQSVSSYLAWYQQKPGQAPRLLIYDASNRATGIPARFSGSGSGTDFTLTISSLEPEDFAVYYCQQRSNWLFTFGPGTKVDIK

SEQ ID NO: 361 - protein, 123 aa, Artificial Sequence
  Synthetic
QVQLQESGPGLVRPSGTLSLTCAVTGGSISSSDCWSWVRQPPGKGLEWIGEICHGRTSNYNPSLKSPVSISVDKSKNQFSLILSSVTAADKAVYYCARSSRFLPPLPDAFDLWGQGTMVTVSS

SEQ ID NO: 362 - protein, 108 aa, Artificial Sequence
  Synthetic
QSVLTQPPSVSGAPGQRVTISCTGSSSNIGAGYDVHWYKQLPGTAPKLLIYGNTNRPSGVPGRFSGSKSGTSASLAITGLQAEDEADYFCQSYDTRLSVVFGGGTKLT

SEQ ID NO: 363 - protein, 122 aa, Artificial Sequence
  Synthetic
EVQLVESGGGLVQPGGSLRLSCAASGFTFSRYDMHWVRQATGKGLEWVSIIGTAGDTYYPGSVKGRFTISRDNAKNSLFLQMNSLRAGDTAVYYCARANYDSSGYHNWFDPWGQGTLVTVSS

SEQ ID NO: 364 - protein, 107 aa, Artificial Sequence
  Synthetic
DIQMTQSPSSLSASIGDRVTITCRASQNINSYLNWYQQKPGKAPKLLIYAASSLQSGVPSRFSGSGSGTDFTLTINSLQPEDFATYYCQQSYSMPSWTFGQGTKVEI

SEQ ID NO: 365 - protein, 122 aa, Artificial Sequence
  Synthetic
QVQLQESGPGLVKPLQTLSLTCTVSGGSISNGDYYWSWIRQSPGKGLEWIGNIFYSGATYFNPSLKSRVTLSVDTSKNQFSLKLSSVTAADTAVYYCARVVRVLPAASVDCWGQGTLVTVSS

SEQ ID NO: 366 - protein, 109 aa, Artificial Sequence
  Synthetic
QSALTQPRSVSGSPGQSVPISCTGTSSDVGGYDYVSWYQQHPGKAPKLIIYDVSERPSGVPDRFSGSKSGNTASLTISGLQAEDEATYYCCSYAGTSVMFGGGTKLTVL

SEQ ID NO: 367 - protein, 120 aa, Artificial Sequence
  Synthetic
QVQLQESGPRLVKPSGTLSLTCAVSGGSISTTNWWSWVRQPPGKGLEWIGEIHHSGNTNYNPSLKSRVTISVDRSKNQFSLKLSSVTAADTAVYFCARDGGRPGDPFDIWGQGTMVTVSS

SEQ ID NO: 368 - protein, 109 aa, Artificial Sequence
  Synthetic
QSALTQPASVSGSPGQSITISCTGTSSDVGGYNYVSWYQQHPGKAPNLMIYDVSDRPSGVSNRFSGSKSGNTASLTISGLQAEDEADYYCNSFTSNSTRVFGTGTKVTV

SEQ ID NO: 369 - protein, 121 aa, Artificial Sequence
  Synthetic
EVQLVESGGGLVQPGRSLRLSCAASGFTFDDYAMHWVRQVPGKGLEWVSGVSWNGDSVGYADSMEGRFTISRDNAKNSLYLQMNSLRTEDTALYYCAKGVDYSSSSNFDFWGQGTLVTVSS

SEQ ID NO: 370 - protein, 107 aa, Artificial Sequence
  Synthetic
DIQMTQSPSSVSASVGDRVTITCRASQGISSWLAWYQQKPGKAPKLLISLASSLQSGVPSRFSGSGSETDFTLIISSLQPEDFATYYCQQSSSFPLTFGGGTKVEIK

SEQ ID NO: 371 - protein, 121 aa, Artificial Sequence
  Synthetic
QVQLVESGGGVVQPGKSLRLSCAASGFIFSSYSMHWVRQAPGKGLEWVAVVSNDGSGKFYADSVRGRFTIFRDNSKNTLYLQVSSLRAEDTAVYYCARDALTSISVLFDCWGQGTLVTVSS

SEQ ID NO: 372 - protein, 108 aa, Artificial Sequence
  Synthetic
DIQMTQSPSSLSASLGDRVTITCRASQSISNYLNWYQQKPGKAPKLLIYGASSLQSGVPSRFSGSGSGTDFTLTISNLQPEDFATYFCQQSYSTPSVTFGGGTKVEIK

SEQ ID NO: 373 - protein, 117 aa, Artificial Sequence
  Synthetic
EVQLVESGGGLVQPGGSLRLSCAASGFIVTTNYMSWVRQAPGKGLEWVSLIYPGGSTFYADSVEGRFTISRDNSKNTLYLQVNSLRVEDTAVYYCARDTFGRGDDHWGQGTLVTVSS

SEQ ID NO: 374 - protein, 106 aa, Artificial Sequence
  Synthetic
DIQMTQSPSSLSASVGDRVTITCQASQDINIYLNWYQQRPGKAPKLLIYDASNLQTGVPSRFSGSGSGTDFTITISSLQPEDIATYYCQQYDNLPRSFGQGTKLEI

SEQ ID NO: 375 - protein, 128 aa, Artificial Sequence
  Synthetic
QVQLVESGGGVVQPGRSLRLSCADSGFTFSSSGMHWVRQAPGKGLEWVGVISYDGGNKYYADSVKGRFTISRDNSKNTLYLQMNSLRAEDTAVYYCAKDTPGGDDIMTGWGLYGMDVWGQGTTVTVSS

SEQ ID NO: 376 - protein, 107 aa, Artificial Sequence
  Synthetic
DIQMTQSPSSLSASVEDRVTITCRASQSISSYLNWYQQKPGKAPKLLIYAAISLQSGVPSRFSGSGSGTEFTLTISSLQPEDFATYYCQQSYTTPWAFGQGTKVEIK

SEQ ID NO: 377 - protein, 123 aa, Artificial Sequence
  Synthetic
QVQLVESGGGVVQPGRSLRLSCAASGFTFSSFGMHWVRQAPGKGLEWVAVISYDGSYKDYGDSVKGRFTISRDNSKNTLYLQMNSLRAEDTAVYYCARDSNVDTVMVTWFDYWGRGTLVTVSS

SEQ ID NO: 378 - protein, 108 aa, Artificial Sequence
  Synthetic
DIQMTQSPPSLSAAVGDRVTITCRASQSISSYLNWYQQKPGKAPKLLIYAASSLQSGVPSRFSGSGSGTDFTLTISSLQPEDFATYYCQQSYSTPPWTFGQGTKVEIK

SEQ ID NO: 379 - protein, 117 aa, Artificial Sequence
  Synthetic
EVQLVESGGGLVQPGGSLRLSCEASGVIVSSNYMNWVRQAPGKGPEWVSVLYAGGSTFYADSVKGRFTISRDDSKNTLFLQMNNLRAEDTAVYFCARDLIAFGMDVWGQGTTVTVSS

SEQ ID NO: 380 - protein, 106 aa, Artificial Sequence
  Synthetic
DIQLTQSPSFLSASVGDRVTITCRASQGINSDLAWYQQKPGKAPKLLIYGASTLQSGVPSRFSGSGSGTEFSLTVSSLQPEDFATYYCQQLNSYRRFGGGTKVEIK

SEQ ID NO: 381 - protein, 122 aa, Artificial Sequence
  Synthetic
QLQLQESGPGLVKPSETLSLTCTVSGGSINTSTYYWGWIRQPPGKGLEWIGNIYYSGITYYNPSLKSRVTISVDTSKNQFSLKLRSVTAADTAVYYCARQHRFGSGSSELLWGQGTLVTVSS

SEQ ID NO: 382 - protein, 109 aa, Artificial Sequence
  Synthetic
QSALTQPPSASGSPGQSVTISCTGTSSDVGSYNYVSWYQQHPGKAPKLMIYEVTKRPSGVPDRFSGSKSGNTASLTVSGLQADDEADYYCSSYAGSSNLVFGGGTKLTV

SEQ ID NO: 383 - protein, 129 aa, Artificial Sequence
  Synthetic
EVQLVESGGSLVKPGGSLRLSCVASGLTFNHAWMSWVRQAPGKGLEWVGRIKSKIDGGTTDYAAPVKGRFTISRDDSKSTQYLQMNSLKTEDTAVYYCTTDCFWRLGGTTCYEHDAFDVWGQGTMVTVS

SEQ ID NO: 384 - protein, 106 aa, Artificial Sequence
  Synthetic
DIQMTQSPSSLSASVGDRVTITCRASQAIATFLNWYQQKPGKAPKLLIYAASSLQSGVPSRFSGSGSGTDFTLTISSLQPEDFATYYCQQSYNSLHFGGGTKVEIK

SEQ ID NO: 385 - protein, 131 aa, Artificial Sequence
  Synthetic
QVQLVQSGAEVKKPGSSVKVSCKASGGTFSRNVISWVRQAPGQGLEWMGGIIPMFGTANYAQKFQGRVTISADESTSTAYMELSSLRSEDTAVYYCAREDFILESAPIRENSYYYYGMDVWGQGTTVTVSS

SEQ ID NO: 386 - protein, 108 aa, Artificial Sequence
  Synthetic
EIVLTQSPGTLSLSPGERATLSCRASQSVSSNYLAWYQQKPGQAPRLLIYDASSRATGIPDRFSGSGSGTDFTLTIRRLEPEDFAVYYCQQYGGSPRTFGQGTKVEIK

SEQ ID NO: 387 - protein, 124 aa, Artificial Sequence
  Synthetic
QLQLQESGPGLVKPSETLSLTCTVSGGSVSSNNHYWGWIRQPPGKGLEWIGSISSSGSTHHNPSLRSRVTISVDTSKNHFSLKLNSVTATDTAVYYCARVDSSGWYTGDVFDVWGQGTMVTVSS

SEQ ID NO: 388 - protein, 107 aa, Artificial Sequence
  Synthetic
DIQMTQSPSSLSASVGDRVTITCRASQTINNYLNWYQQKPGKPPKLLIYAAFSLHSGVPSRFSGSRSGTDFTLTISSLQPEDFATYYCQHSYSTMCSFGQGTKLEIK

SEQ ID NO: 389 - protein, 115 aa, Artificial Sequence
  Synthetic
EVQLVESGGGLIQPGGSLRLSCAASGLTVSRNYMNWVRQAPGKGLEWVSVMYSGGSTFYADSVKGRFTISRDNSKNTLYLQMNSLRAEDTAVYYCARESYGMDVWGQGTTVTVSS

SEQ ID NO: 390 - protein, 108 aa, Artificial Sequence
  Synthetic
EIVLTQSPGTLSLSPGERATLSCRASQSFSSTYLAWYQQKPGQAPRLLIYGASSRATGIPDRFSGSGSGTDFTLTISRLEPEDFAVYYCQQYVTSPWTFGQGTKVEIK

SEQ ID NO: 391 - protein, 115 aa, Artificial Sequence
  Synthetic
EVQLVESGGGLIQPGGSLRLSCAASGLIVSRNYMNWVRQVPGKGLEWVSVMYAGGSTFYADSVKGRFTISRDDSKNTLYLQMNSLRPEDTAVYYCARESYGMDVWGQGTTVTVSS

SEQ ID NO: 392 - protein, 108 aa, Artificial Sequence
  Synthetic
EIVLTQSPGTLSLSPGERATLSCRASQSISSTYLAWYQQKPGQAPRLLIYGASSRATGIPDRFSGSGSGTDFTLTISRLEPEDFAVYYCQQYVTSPWTFGQGTKVEIK

SEQ ID NO: 393 - protein, 120 aa, Artificial Sequence
  Synthetic
QVQLVQSGAEVKKPGASVKVSCKASGYTFTSYYMHWVRQAPGQGLEWMGIINPSGGSTRYAQKFQGRVTMTRDTSTSTVYMELSSLRSEDTAVYYCAREGVGGTSYFDYWGQGTLVTVSS

SEQ ID NO: 394 - protein, 108 aa, Artificial Sequence
  Synthetic
SYELTQPPSVSVAPGKTARITCGGNNIGSKSVHWYQQKPGQAPVLVVYDDSDRPSGIPERFSGSNSGNTATLTISRVEAGDEADYYCQVWDSSSDPYVFGTGTKVTVL

SEQ ID NO: 395 - protein, 117 aa, Artificial Sequence
  Synthetic
QVQLVQSGAEVKKPGASVKVSCKASGYTFTSHYMHWVRQAPGQGLEWMGIINPRTRYAQMFQGRVSMNRDTSTSTVYMELSSLTSEDTAVYYCAREGLGATAYFDYWGQGTLVTVSS

SEQ ID NO: 396 - protein, 108 aa, Artificial Sequence
  Synthetic
SYELTQPPSVSVAPGKTAGITCGGSDIGSKSVHWYQQKPGQAPVLVVYDDSDRPSGIPERFSGSNSGNTATLTISRVEAGDEADYYCQVWDSSSDPYVFGTGTKVSVL

SEQ ID NO: 397 - protein, 120 aa, Artificial Sequence
  Synthetic
QVQLVESGGGVVQPGRSLRLSCAASGFSFINYNMHWVRQAPGKGLEWVAVIWYDGSNKYYADSVKGRFTISRDNSKNTLYLQMNSLRVEDTAVYYCARDPAITEAEIDYWGQGTLVTVSS

SEQ ID NO: 398 - protein, 112 aa, Artificial Sequence
  Synthetic
DVVMTQSPLSLPVTLGQAASISCRSSQSLVHSDGNTYLNWFQQRPGQSPRRLIYRVSNRDSGVPDRFSASGSGTDFTLKISRVEAEDVGVYYCMQGTHWPWTFGQGTKVEIK

SEQ ID NO: 399 - protein, 122 aa, Artificial Sequence
  Synthetic
QVQLVQSGAEVKKPGASVKVSCKASGYTFSDHYIYWVRQAPGQGLEWMGIINPSAGSTSYAQKFQGRVTMTRDTSTSTVYMELSSLRSEDTAVYYCARDIVFVPATMAMDVWGLGTTVTVSS

SEQ ID NO: 400 - protein, 107 aa, Artificial Sequence
  Synthetic
EIVLTQSPATLSLSPGERATLSCRASQSVSRYLAWYQQKPGQAPRLLIYDASNRATGIPARFSGSGSGTDFTLTISSLEPEDFAVYYCQQRSNWLFTFGPGTKVDIK

SEQ ID NO: 401 - protein, 122 aa, Artificial Sequence
  Synthetic
QVQLVQSGAEVKKPGASVKVSCKASGYTFSDHYIYWVRQAPGQGLEWMGIINPSGGSTSYAQKFQGRVTMTRDTSTSTVYMELSSLKSEDTAVYYCSRDIVFVPATMAMDVWGQGTTVTVSS

SEQ ID NO: 402 - protein, 107 aa, Artificial Sequence; identical to SEQ ID NO: 400
  Synthetic

SEQ ID NO: 403 - protein, 122 aa, Artificial Sequence
  Synthetic
EVQLVESGGGLVQPGRSLRLSCAASGFIFDNYAMHWVRQAPGKGLEWVSGISWNSDSIGYADSVKGRFTISRDNAKNSLYLQMSSLRAEDTALYYCAKDLLGNYYYYTLDVWGQGTTVTVSS

SEQ ID NO: 404 - protein, 111 aa, Artificial Sequence
  Synthetic
QSALTQPASVSGSPGQSITISCTGTSSDIGGNNYVSWYQQHPGKAPRLMIFDVSYRPSGVSNRFSGSKSGNTASLTISGLQAEDEADYYCISYTTSSTLGVFGGGTKLTVL

SEQ ID NO: 405 - protein, 120 aa, Artificial Sequence
  Synthetic
QVQLQESGPGLVKPSQTLSLTCTVSGGSISSGNYYLTWIRQPAGKGLEWIGHIYTSGSTNYNPSLKSRVTISVDTSMNQFSLKLSSVTAADTAVYYCARDIPPTWYFDLWGRGTLVTVSS

SEQ ID NO: 406 - protein, 110 aa, Artificial Sequence
  Synthetic
SYELTQPPSVSVAPGKTARITCGGNNIGSKNVHWYQQKPGQAPVLVVYDDSDRPSGIPERFSGSNSGNTATLTISRVEAGDEAGYYCQVWDSTSDHLFWVFGGGTKLTVL

SEQ ID NO: 407 - protein, 120 aa, Artificial Sequence
  Synthetic
QVQLQESGPGLVKPSQTLSLTCTVSGDSISSGNYYWSWIRQPAGKGLEWIGHIYTSGSPNYKPSLKSRVTISLDTSKNQFSLKLTSVTAADTAMYYCARDIPSTWYFDLWGRGTLVTVSS

SEQ ID NO: 408 - protein, 110 aa, Artificial Sequence
  Synthetic
SYELTQPPSVSVAPGKTARIPCGGTDIGSKNVHWYQQKPGQAPVLAVYDDSDRPSGIPERFSGSNSGSTATLTISRVEAGDEADYYCQVWDSSGDRLSWVFGGGTKLTVL

SEQ ID NO: 409 - protein, 131 aa, Artificial Sequence
  Synthetic
EVQLVQSGAEVKKPGESLKISCKGSGYSFTSYWIGWVRQMPGKGLEWMGIIYPGDSDTRYSPSFQGQVTISADKSISTAYLQWSSLKASDTAMYYCARMVTSGTYYYDNSGYSSSGPFDYWGQGTLVTVSS

SEQ ID NO: 410 - protein, 103 aa, Artificial Sequence
  Synthetic
DIQLTQSPSSLSASVGDRVTITCRASQGISSALAWYQQKPGKAPKLLIYDASSLESGVPSRFSGSGSGTDFTLTISSLQPEDFATYYCQQFNNFGPGTKVDIK

SEQ ID NO: 411 - protein, 131 aa, Artificial Sequence
  Synthetic
EVQLVQSGAEVKKPGESLKISCKGSGYSFISYWIVWVRQMPGKGLEWIGIIYPGDSDTIYSPSFQGQVTLSADKSISTAYLQWSSLKASDTAIYYCAKMVTSGTSYYETRGYASSGPFDNWGQGTLVTVSS

SEQ ID NO: 412 - protein, 102 aa, Artificial Sequence
  Synthetic
DIQLTQSPSSLSASVGDRVTITCRASQGISSALAWYQQKPGKAPKLLIYDASSLESGVPSRFSGSGSGTDFTLTISSLQPEDFATYYCQQSDNFGPGTKVDI

SEQ ID NO: 413 - protein, 116 aa, Artificial Sequence
  Synthetic
EVQLVQSGAEVKKPGESLKISCKVSGYSFISHWIGWVRQMPGKGLEWMGIIYPGDSDTRYSPSFQGQVTISADKSISTAYLQWSSLKASDTAMYYCARRGASWELDYWGQGTLVTV

SEQ ID NO: 414 - protein, 110 aa, Artificial Sequence
  Synthetic
QSVLTQPPSASGTPGQRVTISCSGSSSNIGSNPVSWYQQLPGPAPQLLIYGNDQRPSGVPDRFSGSKSGTSASLAISGLQSEDEADYYCAAWDDSLNGYVFGTGTKVTVL

SEQ ID NO: 415 - protein, 118 aa, Artificial Sequence
  Synthetic
EVQLVQSGAEVKKPGESLKISCKSSGYSFISHWIGWVRQMPGKGLEWMGIIWPGDSDTRYSPSFQGQVTISVDKSITTVYLQWSSLKAADTAMYYCARRGSSWEVDYWGQGTLVTVSS

SEQ ID NO: 416 - protein, 110 aa, Artificial Sequence
  Synthetic
QSVLTQPPSASGTPGQRVTISCSGSSSNIGSNTVNWYLQLPGTAPKLLIYGNDQRPSGVPDRFSGSKSGTSASLAISGLQSEDEADYYCAAWDDRLNGYVFGTGTTVTVL

SEQ ID NO: 417 - protein, 123 aa, Artificial Sequence
  Synthetic
EVQLVESGGGLVQPGRSLRLSCAASGFTFDDYGMHWVRQAPGKGLEWVSGISWNGDSIGYADSVKGRFTISRDNAKTSLYLQMNRLRAEDTALYYCAKAASRSTRIGGAFDIWGQGTMVTVSS

SEQ ID NO: 418 - protein, 109 aa, Artificial Sequence
  Synthetic
QSALTQPASVSGSPGQSITISCTGTSSDVGGYNLVSWYQQHPGKAPKLMIYEGSKRPSGVSNRFSGSKSGNTASLTISGLQAEDEADYYCCSYAYSFTNVFGTGTKVTV

SEQ ID NO: 419 - protein, 123 aa, Artificial Sequence
  Synthetic
EVQLVESGGGLVQPGRSLRLSCVASGFTFDDYGLHWVRQAPGKGLEWVSGISWNSDSIGYADSVKGRFAISRDNARTSLYLQMNRLRAEDTALYYCAKAASRSTRIGGAFDIWGQGTMVTVSS

SEQ ID NO: 420 - protein, 109 aa, Artificial Sequence
  Synthetic
QSALTQPASVSGSPGQSITISCTGTSSDVGGYNLVSWYQQYPGKAPKLMIYEDSKRPSGVSHRFSGSKSGNTASLTISGLQAEDEADYYCCSYAFSFTNVFGTGTKVTV

SEQ ID NO: 421 - protein, 123 aa, Artificial Sequence
  Synthetic
QVQLVQSGAEVKKPGASVKVSCKVSGYTLSELSMHWVRQAPGEGLEWLGGFDPEDGETINAQKFQGRVTMTEDRSTDTAYMELSSLRSEDTAVYYCATRGRYCSSGNCYYHHWGQGTLVTVSS

SEQ ID NO: 422 - protein, 107 aa, Artificial Sequence
  Synthetic
DIQMTQSPSTLSASVGDRVIITCRASQNIHNWLAWYQQKPGKAPKLLIYKASSLESGVPSRFSGSGSGTEFTLTISSLQPDDFATYFCQQYHSYSWTFGQGTKVEIK

SEQ ID NO: 423 - protein, 123 aa, Artificial Sequence
  Synthetic
EVQLLESGGGLVQPGGSLRLSCAASGFTFSSYAMNWVRQAPGKGLEWVSAISGSGGGTYYADSVKGRFTISRDNSKNTLYLQMDSLRAEDTAVYYCAKDVPIEQQLVPTFDYWGQGALVTVSS

SEQ ID NO: 424 - protein, 108 aa, Artificial Sequence
  Synthetic
DIQMTQSPSSLSASVGDRVTITCRASQSISRYLNWYQQKPGKAPKLLIYGASSLQSGVPSRFSGSGSGTDFTLTISSLQPEDFATYWCQQSYSTLSITFGQGTRLEIK

SEQ ID NO: 425 - protein, 123 aa, Artificial Sequence
  Synthetic
EVQLLESGGGLVQPGGSLRLSCVVSGFTFSSYAMNWVRQAPGKGLEWVSVIGGSGDGRYYADSVKGRFTISRDNSKNTLYLQMNSLRGDDTAVYYCARDVPVEQQLVPTFDYWGQGTLVTVSS

SEQ ID NO: 426 - protein, 108 aa, Artificial Sequence
  Synthetic
DIQMTQSPSSLSASVGDRVTITCRASQSISRYLNWYQQKPGKAPKLLIYAASSLQSGVPSRFSGSGSGTEFTLTISSLQPEDFATYYCQQSYSTLSITFGQGTRLEIK

SEQ ID NO: 427 - protein, 127 aa, Artificial Sequence
  Synthetic
QVQLVESGGGVVQPGRSLRLSCAASGFTFSTYGMNWVRQAPGKGLEWVALILYDGSDKYYADSVKSRFTISRDNSRNTLYLQMTSLRAEDTAVYYCAKALSSTYYYDASGPDAFDIWGQGTMVTVSS

SEQ ID NO: 428 - protein, 107 aa, Artificial Sequence
  Synthetic
DIQMTQSPSTLSASVGDRVTITCRASQSISSWLAWYQQKPGKAPKLLIYKASSIESGVPPRFSGSGSGTEFTLTISSLQPDDFATYYCQQYNSYSYTFGQGTKLEIK

SEQ ID NO: 429 - protein, 127 aa, Artificial Sequence
  Synthetic
QVQLVESGGGVVQPGRSLRLSCAASGFTFSTYGMNWVRQAPGKGLEWVALILFDGSDKYYADSVKSRFTISRDNSRNTLYLQMTSLRAEDTAVYYCAKALSSTFYFDASGPDAFDIWGQGTMVTVSS

SEQ ID NO: 430 - protein, 107 aa, Artificial Sequence
  Synthetic
DIQMTQSPSTLSASVGDRVTITCRASQSISTWLAWYQQKPGKAPQLLIYKASSIESGVPPRFSGSGSGTEFTLTISSLQPDDFATYYCQQYNSYSYTFGQGTKLEIK

SEQ ID NO: 431 - protein, 128 aa, Artificial Sequence
  Synthetic
QVQLVQSGAEVKKPGSSVKVSCKASGGTFTTYIISWVRQAPGQGLEWMGGISPMLGTANYAQKFQGGVTITADESTTTAYMEMSGLRSEDTAVYYCARAHMYCSDGSCYRQSGYFDSWGQGTLVTVSS

SEQ ID NO: 432 - protein, 109 aa, Artificial Sequence
  Synthetic
QSALTQPRSVSGSPGQSVTITCTGTSSNVGGYKYVSWFQQHPGKAPKFLIYDVSERSSGVPDRFSGSKSGNTASLTISGLQAEDEADYYCCSYAGKYTVVFGGGTRLTV

SEQ ID NO: 433 - protein, 115 aa, Artificial Sequence
  Synthetic
EVQLVESGGGLVQPGGSLRLSCAASGIIVSSNYMNWVRQVPGKGLEWVSVLYSGGSTFYADSVRGRFTISRDNSKNTLFLQMNSLRPEDTAVYYCARDFREGAFDIWGQGTMVTV

SEQ ID NO: 434 - protein, 107 aa, Artificial Sequence
  Synthetic
DIQLTQSPSFLSASVGDRVTITCRASQGISSYLAWYQQKPGKAPNLLIYAASTLQSGVPSRFSGSGSGTDFTLTISSLQPEDFATYYCQQLNSYSPLFGQGTRLEIK

SEQ ID NO: 435 - protein, 117 aa, Artificial Sequence
  Synthetic
EVQLVESGGGLVQPGGSLRLSCAASGVTVSYNYMHWVRQAPGKGLEWVSVFFPGGSIFYADSVKGRFSISRDNSHNTLYLQMNNLRPEDTAVYYCARDFREGAIDLWGQGTMVTVSS

SEQ ID NO: 436 - protein, 107 aa, Artificial Sequence
  Synthetic
DIQLTQSPSFLSASVEDRVTITCRASQGISSYLAWYQQKPGKAPKLLIYGASTLQSGVPSRFSGSGSGTEFTLTISSLQPEDSATYYCQQLNSYPPLFGQGTRLEIK

SEQ ID NO: 437 - protein, 117 aa, Artificial Sequence
  Synthetic
EVQLVESGGDLVQPGGSLRLSCAASEIIVSRNYMNWVRQAPGKGLEWVSIIYSGGSTFYGDSVKGRFTISRDSSKNTLYLQMHGLRVEDTAIYYCARSYGDYYIDYWGQGTLVTVSS

SEQ ID NO: 438 - protein, 109 aa, Artificial Sequence
  Synthetic
DIQMTQSPSSVSASVGDRVTITCRTSQSISTSLAWYQQKPGKAPKLLIYAASSLQRGVPSRFSGTGSGTDFTLTISSLQPEDFATYYCQQSSSSPPLFTFGPGTKVDIK

SEQ ID NO: 439 - protein, 120 aa, Artificial Sequence
  Synthetic
EVQLVESGGGLVQPGGSLRLSCAASGFTFSRYDMHWVRQGTGKGLEWVSAIGTSGDTYYPDSVKGRFTISRENAKNSLYLQMNSLRAGDTAVYYCARGGLQTTTWLFDYWGQGTLVTVSS

SEQ ID NO: 440 - protein, 108 aa, Artificial Sequence
  Synthetic
DIQMTQSPSSLSASVGDRVTITCRASQSISRYLNWYQQKPGKAPKLLIYAASSLQSGVPSRFSGSGAGTDFTLTISSLQPEDFAIYYCQQSYSNPPITFGQGTRLEIK

SEQ ID NO: 441 - protein, 120 aa, Artificial Sequence
  Synthetic
EVQLVESGGGLVQPGGSLRLSCAASGFTFSNYDMHWVRQTTGKGLEWVSAIGTAGDTYYPGSVKGRFTMSRENAKNSLYLQMNSLRAGDTAVYYCARGGLQTTTWLFDNWGQGTLVTVSS

SEQ ID NO: 442 - protein, 108 aa, Artificial Sequence
  Synthetic
DIQMTQSPSSLSASVGDRVTITCRASQTISRYLNWYQQKPGKAPKLLIYAASSLQSGVPSRFSGSGSGTDFTLTISSLQPEDFATYYCQQSYTMPPITFGQGTRLEIK

SEQ ID NO: 443 - protein, 120 aa, Artificial Sequence
  Synthetic
EVQLVQSGAEVKKPGESLKISCKGYGNSFNNYWIAWVRQMPVKGLEWMGVINPGDSDTRYSPSFQGQVTISVDKSISTAYLQWSSLKASDTAMYYCARTWSPAAVAFFDSWGQGTLVTVS

SEQ ID NO: 444 - protein, 110 aa, Artificial Sequence
  Synthetic
NFMLTQPHSVSESPGKTVTISCTRSSDSIGSNYVQWYQQRPGSSPTIVIYEDSQRPSGVPHRFSGSFDSSSNSASLTISGLKTEDEADYYCQSWDSGNLVFGGGTKLTVL

SEQ ID NO: 445 - protein, 121 aa, Artificial Sequence
  Synthetic
EVQLVESGGGLIQPGGSLRLSCAASGFTVSRNYMSWVRQAPGKGLEWVSVIYSGGSTFYADSVKGRFTISRDNSKNTLYLQMNSLRAEDTAVYYCARGLPTGEGWNYFDYWGQGTLVTVSS

SEQ ID NO: 446 - protein, 109 aa, Artificial Sequence
  Synthetic
QSALTQPASVSGSPGQSITISCTGTSSDIGGYHYVSWYQQHPGKAPKLMIYDVSNRPSGISNRFSGSKSGNTASLTISGLQAEDEADYYCSSYASSSVIFGGGTKLTVL

SEQ ID NO: 447 - protein, 121 aa, Artificial Sequence
  Synthetic
EVQLVESGGGLVQPGRSLRLSCAASGFMFDDYAMHWVRQAPGKGLEWVSGINWSSADIGYVDSVKGRFTISRDNAKNSLYLQMNSLRTEDTAFYYCAKGWFGELLGGSDSWGQGTLVTVSS

SEQ ID NO: 448 - protein, 111 aa, Artificial Sequence
  Synthetic
QLVLTQSSSASASLGSSVKLTCTLNSGHSSYIIAWHQQQPGKAPRYLMKLEGSGSYNKGSGVPDRFSGSSSGADRYLTISNLQFEDEADYYCATWDSNTQVFGGGTKLTVL

SEQ ID NO: 449 - protein, 122 aa, Artificial Sequence
  Synthetic
QVQLVQSGAEVKKPGASVKVSCKASRDTFTTHYIHWVRQAPGQGLEWMGIINPSGGSISYAQKFQGRVTMTRDTSTSTVYMELSSLRSEDTAVYYCARGGIVPHLSNWFDPWGQGTLVTVSS

SEQ ID NO: 450 - protein, 109 aa, Artificial Sequence
  Synthetic
EIVLTQSPGTLSLSPGERATLSCRASQSVSSSYLAWYQQKPGQAPRLLIYGASSRATGIPDRFTGSGSGTDFTLTISRLEPEDFAVYYCQQYGRSSGFTFGPGTKVDIK

SEQ ID NO: 451 - protein, 122 aa, Artificial Sequence
  Synthetic
QVQLVESGGGVVQPGRSLRLSCAASGFTFSTFAMHWVRQAPGKGLEWVAVTSYDGSNKYYADSVKGRFTISRDNSKNTLYLQMNSLRAEDTAVYYCARGLLWFGESEYFQHWGQGTLVTVSS

SEQ ID NO: 452 - protein, 113 aa, Artificial Sequence
  Synthetic
DIVMTQSPDSLAVSLGERATINCKSSQSVLFSSTNKNYLAWYQQKPGQPPKLLIYWAATRESGVPDRFSGSGSGTDFTLTISSLQAEDVAVYHCQQYYSTPFTFGPGTKVDIK

SEQ ID NO: 453 - protein, 121 aa, Artificial Sequence
  Synthetic
QVQLVESGGGVVQPGRSLRLSCAASGFTFSSYSIHWVRQAPGKGLEWVAVISDDASMKFYADSVKGRFTISRDNSKNTLFLQMNSLSPEDTAVYYCARDALTAISVRFDYWGQGTLVTVSS

SEQ ID NO: 454 - protein, 108 aa, Artificial Sequence
  Synthetic
DIQMTQSPSSLSASVGDRVTITCRASQSISRYLNWYQQKPGKAPKLLIYDASSFQSGVPSRFSGSGSGTDFTLTISSLQPEDFATYYCQQSYSTPSVTFGGGTKVEIK

SEQ ID NO: 455 - DNA, 375 bp, Artificial Sequence
  Synthetic
caggtgcagctggtggagtctgggggaggcttggtcaagcctggggggtccctgactctctcctgtgcaggcgctggattcaatttcagtgactattgcctgacctggatccgtcaggctccagggaaggggctggagtgcctttcatacatttgtagtggtgctgatgaaacatatatcgctgactctgtgaagggccgattcaccatctccagggacaacgccaagaattcactgtatttgaaaatgagcagcctgagagccgaagacacggccgtctattactgtgcgagaaggggggacggtaacaccccgatctaccactactactacatggacgtctggggcaaagggaccacggtcaccgtctcctca

SEQ ID NO: 456 - DNA, 331 bp, Artificial Sequence
  Synthetic
cagtctgtgctgactcagccaccgtcagcgtctgggacccccggacagagggtcaccatcccttgttctggaggcagctccaacatcggcagtaacaccgtacactggtatcagcaggtcccaggaacggcccccaaactcctcgtctatggtaataatcggcggcccgcaggggtccctgaccgattctctggctccaggtctggcgcctcagcctccctggccatcactgggctccagtctgaggatgaggctgtgtactactgtgcaacatgggatgacagcccgaatggtccggttttcggcggagggaccaagctgaccgtcctag

SEQ ID NO: 457 - DNA, 379 bp, Artificial Sequence
  Synthetic
gaagtgcagctggtggagtctgggggaggcttggtacagcctggcaagtccctgagactctcctgtacagcctctggattcacctttgaagattatgccatgcactgggtccggcaagctccagggaagggcctggagtgggtctcaggtattaattggaagagtggtagtagaggctacgcagactctgcgaagggccgcttcaccatctccggaaacaccgccaagaacaccctccatctgcaaatgaacagtctgcgagcggaggacacggccttctattactgtgcaaaagcgggcgttaggaatatagcagcggctggtcccgacctcaactttgacttctggggccagggaaccctggtcaccgtctcctcag

SEQ ID NO: 458 - DNA, 310 bp, Artificial Sequence
  Synthetic
gaaattgtgttgacacagtctccagccaccctgtctttgtctccaggggaaagagccaccctctcctgcagggccagtcagagtgttggcacctacttagcctggtaccaacacaaacttggccaggctcccaggctcctcatctatgatgcaaccaagagggccactggcatcccagccaggttcagtggcagtgggtctgggacagacttcactctcaccatcagcagcctagagcctgaagattttgctatttattactgtcagcagcgtatcaccttcggccaagggacacgactggagattaaac

SEQ ID NO: 459 - DNA, 362 bp, Artificial Sequence
  Synthetic
caggtgcagctgcaggagtcgggcccaggactggtgaagcctttagataccctgtccctcacatgcactgtctctggtgcctccatcagcagttactattggagctggatccggcagcccgccgggaagggactggagtggattggacttatctatagtagtggaagcactacttacaacccctccctcaagagtcgagtcaccatgtcagttgacacgtccaagaagcagttctccctgaacctcagttcgatgaccgccgcggacacggccgtgtattactgtgcgagagggtcggccttaaactggaagtccattggatactttgactcctggggccagggaaccctggtcaccgtctc

SEQ ID NO: 460 - DNA, 322 bp, Artificial Sequence
  Synthetic
gacatccagatgacccagtctccatcctccctgtctgcatctataagagacagagtcaccatcacttgccaggcgagtcaggacataagtaattatttaaattggtatcagcagaaagcaggggaagcccctaaacttctgatctacgatgcatccagtttggaaacaggggtcccatcaaggttcagtggaagtggatctgggacagaatttactctcaccatcagcagcctgcagcctgaagacattgccacatattactgtcaacagtatgatcatgtcccgctcactttcggcggagggaccaaggtggagatcaaac

SEQ ID NO: 461 - DNA, 370 bp, Artificial Sequence
  Synthetic
caggtgcagctggtggagtctgggggaggcgtggtccagcctgggaggtccctgagactctcctgtgaagcctctggattcaccttcactgcctatgctatgcactggctccgccaggctccaggcaaggggctggagtgggtggcagttatcttaaatgatggaagcaataaattgtacgcagactccgtgaagggccgattcaccgtctcccgagataattccaagaacatgctgtatctgcaagtgaacagcctgagagttgacgacacggctgtgtattattgtgcgagagacgggagcgtggatacacttatggttacgtggtttgattattggggccagggaaccctggtcaccgtctcctcag

SEQ ID NO: 462 - DNA, 325 bp, Artificial Sequence
  Synthetic
gacatccagatgacccagtctccatcctccctgtctgcatctgtaggagacagagtcaccatcacttgccgggcaagtcagagcgttaacaactatttaaattggtatcagcagaaaccagggcaagcccctaagctcctgatctatgctgcatccagtttgcaaagtggggtcccattaaggttcagtggcagtggatctgggacagatttcgctctcaccatcaccagtctccatactgaggattttgccacttactactgtcaacagagttacaataccccgccgtggacgttcggcccagggaccaaggtggaaatcaaac

SEQ ID NO: 463 - DNA, 385 bp, Artificial Sequence
  Synthetic
gaggtgcagctggtggagtctgggggaggcttggtacagccgggggggtccctgaggctctcctgtgctgcctctggattcaccttcagtatatttagtatgaactgggtccgccaggctccagggaaggggctggagtggatctcatacattagtagtagtagtggttccagacactacgcagactctgtgaagggccgattcaccatctccagagacaatgccaagaattcactgtatctgcaaatgaacaacctgagagacgaggacacggctatgtattactgtgcgagagaggcccacgacggggctctcaccggctacggtgactacctgaactggttcgacccctggggccagggagtcctggtcaccgtctcctcag

SEQ ID NO: 464 - DNA, 331 bp, Artificial Sequence
  Synthetic
tcctatgagctgactcagccaccctccgtgtcagtggccccaggaaagacggccaggattccctgtgggggagacagcgttgggagtaagagtgtacactggtatcaacagaagtctggccaggcccctgtcttagtcattcattctgatagtgaccggccctcagggatccctgagcgattctctggctccaactctgggaacacggccaccctgaccatcaccggggtcgcagccggggatgaggccgactattattgtcatgtgtgggatactattggtgatcgtttttattgggtgtttggcggagggaccaagctgaccgtcctag

SEQ ID NO: 465 - DNA, 382 bp, Artificial Sequence
  Synthetic
caggtgcagctggtggagtctgggggaggcgtggtccagcctgggaggtccctgaggctctcctgtgcagcctctggattcaccttcagtacctatgctatccactgggtccgccaggctccaggcaaggggctggagtgggtggcagctatatcatatgatggaagcaataaatactactcagactccgtgaagggccgactcttcatctccagagacaattccaacaacacagtgtatctgcaaatgaacaatctgagagctgaggacacggctatttattactgtgcgagagatgggactattgttactttggttcgaggagttatgggaccaccctttgactactggggccagggaaccctggtcaccgtctcctcag

SEQ ID NO: 466 - DNA, 322 bp, Artificial Sequence
  Synthetic
gacatccagatgacccagtctccatcctccctgtctgcatctgtaggagacagagtcaccatcacttgccaggcgagtcagcacattagcaattacttaaattggtatcagcagaaacctgggaaagcccctaagctcctgatctacgatgcatccaatttggaaacaggggtcccatcaaggttcagtggaactggatctgggacagattttgctttcaccatcagcagcctgcagcctgaagatattgcaacatattactgtcaacaatatgataatctccctccggttttcggccctgggaccaaagtggatatcaaac

SEQ ID NO: 467 - DNA, 382 bp, Artificial Sequence
  Synthetic
caggtgcagctggtggagtctgggggaggcgtggtccaacctgggaggtccctgagactctcctgtgcagcctctggattcaccttcagtcgctatgccatgcactgggtccgccaggctccaggcaaggggctggagtgggtggcagttatatcatatgatggaagtaataaatactatgcaacctccctgaagggccgatgcaccatctccagagacaattccaagaacacgctgtatctgcaaatgaacagcctgagagctgaggacacggctgtgtatttctgtgcgaagcaaatcggggaatattgtagtggtggtaactgctaccaggggagtcttgactactggggccagggaaccctggtcaccgtctcctcag

SEQ ID NO: 468 - DNA, 322 bp, Artificial Sequence
  Synthetic
gacatccagatgacccagtctccatcctccctgtctgcatctgtcggagacagagtcaccatcacttgccaggcgagtcaggacattagcaactatttaaattggtatcagcagaaaccagggaaagcccctaaactcctaatctacgacgcatccgatttggaaacaggggtcccatcaacgttcagtggaagtggatctgggacagattttactctcaccatcagcagcctgcagcctgaagattttgcaacatattactgtcaacagtatgatattgtcccattcactttcggccctgggaccaaagtggatatcaaac

SEQ ID NO: 469 - DNA, 382 bp, Artificial Sequence
  Synthetic
gaggtgcagctggtggagtctgggggaggcttggtaaagcctggggggtcccttagactctcctgtgtagccactggattcagtttcagtgacgcctggatgaactgggtccgccaggctccagggaaggggctggagtgggttggccgtattagaagtgagattgctgatgggacaacagactatgctgcacccgtaaaaggcagattcacgatctctagagatgatgcaagaaacacactgtatctgcaaatgaacagcctggaaatagaggacaccgccgtatattactgcaccacaggtgttgtggtggtggtttcgtctagtcccgatgatgcttttgatgtctggggccaaggtacaatggtcaccgtctcttcag

SEQ ID NO: 470 - DNA, 322 bp, Artificial Sequence
  Synthetic
gacatccagatgacccagtctccatcctccctgtctgcatctgtaggagacagagtcaccatcacttgccgggcaagtcagagtattggccactatttaaattggtatcagcagaaaccagggaaagcccctaaactcctgatatatgccgcatccagtttgcaaagtggagtcccatcaaggttcagtggcagtggatctggggctggtttcactctcaccgtcaacggtctgcaacctgaagatcttgcaacttattactgtcaacagtattacactacccctccgacgttcggccaagggaccaaggtggaaatcaaac

SEQ ID NO: 471 - DNA, 373 bp, Artificial Sequence
  Synthetic
caggtgcagctgcaggagtcgggcccaggactggtgaagccttcacagaccctgtccctcacctgcactgtctctggtgcctccatcagcagtggtgaatactactggagctgggtccggcagcccccagggaagggcctggagtgggttggctatatctactatagtgggagtacctactacaacccgtccctcaagagtcgagttaccatatcagtggacacgtctaagaaccacttctccctgaagctgaaatctctgacagccgcggacacggccgtgtatttctgtgcgacagggggactctccgcgttcggggaattatttccgcacgacaagtggggccagggaaccctggtcaccgtctcctcag

SEQ ID NO: 472 - DNA, 322 bp, Artificial Sequence
  Synthetic
gaaattgtgttgacacagtctccagccaccctgtctttgtctccaggggaaagagccaccctctcctgcagggccagtcagagtgttggcagcgacttagcctggtaccaacagaaacctggccaggctcccaggctcctcatctatgatacatccaacagggccactggcatcccagccaggttcagtggcagtggatctgggacagacttcactctcaccatcagcagcctagaccctgcagattttgcagtttattactgtcagcagcgtaccaactggctgttcagtttcggccctgggaccaaagtggatatcaaac

SEQ ID NO: 473 - DNA, 361 bp, Artificial Sequence
  Synthetic
caggtgcagctggtggagtctgggggaggcgtgttccagcctgggaggtctctgagactctcctgtgcagcctctggattcaacttcagaacatatgcaatgcactgggtccgccaggctccaggcaaggggctggagtgggtggcagttattttagatgatggaagtggtaagttctacgcagactccgtgaagggccgattcaccgtctccagagacaattccaagcacactctctatctgcaaatgaccagcctgagcgctgaggacacggctatatatttctgtgcgagagatcaggggacggcgacaacgtacttcgaccactggggccagggaaccctggtcaccgtctcctcag

SEQ ID NO: 474 - DNA, 325 bp, Artificial Sequence
  Synthetic
gacatccagatgacccagtctccatcctccctgtctgcatctgtaggagacagagtcactatcacttgccgggcaagtcagagcattcgcacttttttaagttggtatcagcagaaagcagggaaagcccctaaactcctgatctatactgcatccagtttgcaaaatggggtcccatcaaggttcagtggcagtggatctgggacagatttcactctcaccatcagcagtctgcaacctgaagattttgcaacttactactgtcaacagagttacgaaacccctccgtggacgttcggccaagggaccaaggtggaaatcaaac

SEQ ID NO: 475 - DNA, 361 bp, Artificial Sequence
  Synthetic
caggtgcagctggtggagtctgggggaggcgtggtccagcctggggggtccctgagactctcctgtggagcctctggattcaccttcagtagctatgccatgcactgggtccgccaggctccaggcgaggggctggagtgggtggcagttatattatatgatggagccggtaaattttacgcggactccgtgaagggccgattcaccatatccagagacaattccaagaacacactgtatctgcaaatgaacagcctgagagctgaggacacggctgtgtattactgtgcgagagactacggtgactacgttacacactttgactactggggccagggagccctggtcaccgtctcctcag

SEQ ID NO: 476 - DNA, 325 bp, Artificial Sequence
  Synthetic
gacatccagatgacccagtctccatcctccctgtctgcatctgtaggagacagagtcactatcacttgccgggcaagtcagagcattagcagctatttaaattggtatcagcagaaaccagggaaagcccctaaactcctgatctatactgcatccagtttgcaaagtggggtcccatcaaggttcagtggcagtggctctgggacagatttcactctcaccatcaccagtctgcaacctgaagattttgcaacttactactgtcaacagagttacaataccccaccgtggacgttcggccaagggaccaaggtggaaatcaaac

SEQ ID NO: 477 - DNA, 364 bp, Artificial Sequence
  Synthetic
caggtgcagctgcaggagtcgggcccaggactggtgaagccttcacagaccctgtccctcacctgcactgtctctggtggctccatcagcagtggtgattactactggagttggatccgccagcccccagggaagggcctggagtggattggctacatctattacactgggatcacctactacagaccgtccctcaagagtcgagttaccatatcagtggacacgtccaagaaccagttctccctgaagctgagctctgtgactgccgcagacacggccgtcttttactgtgccagagttgtccgtctatggcccaggtactttgactcctggggccagggaaccctggtcaccgtctcctcag

SEQ ID NO: 478 - DNA, 331 bp, Artificial Sequence
  Synthetic
cagtctgccctgactcagcctccctccgcgtccgggtctcctggacagtcagtcaccatctcgtgcactggaaccagcagtgacgttggtacttatgactatgtctcctggtaccaacagcacccgggcaaagcccccaaagtcataatttatgaggtcactaagcggccctcaggggtccctgatcgcttctctggctccaagtctggcaacacggcctccctgaccgtctctgggctccaggctgaggatgaggctcattattactgcagtacatatgcaggcagcgacaatttggagttcggcggagggaccaagctgaccgtcctag

SEQ ID NO: 479 - DNA, 370 bp, Artificial Sequence
  Synthetic
caggtgcagctggtgcagtctggggctgaggtgaagaagcctggggcctcagttaaggtctcctgcagggcttctggatacacgttcaccgaccactatatccactgggtgcgacaggcccctggacaagggcttgagtggatgggatggatcaacccaaacagtggtgacacaaactatccacagaagtttcagggcagggtcaccatggccagggacacgtccatcagcacagcccacatggagctgaggaggctgaaatctgacgacacggccgtgtattactgtgcgaggacgtcgtccccccatagcagctcgacaggggactttgactcctggggccagggaaccctggtcaccgtctcctcag

SEQ ID NO: 480 - DNA, 330 bp, Artificial Sequence
  Synthetic
tcctatgagctgacacagccaccctcagtgtcagtggccccaggaaagacggccaggattacctgtgggggagacgacattggaagtaaaagtgtgcactggtaccagcagaagtcaggccaggcccctgtgttggtcatccatgatgatagcgaccggccctcagggatccctgagcgattctctggctccaactctgggaacacggccaccctgaccatcagcagggtcgaagccggggatgaggccgactattactgtcaggtgtgggattttactggtgatcacccgggatgggtgttcggcggagggaccaagctgaccgtccta

SEQ ID NO: 481 - DNA, 384 bp, Artificial Sequence
  Synthetic
caggtgcagctgcaggagtcgggcccaggactggtgaagccttcggagaccctgtccctcatctgctctgtctctggtgtctccgtcagcagtagaaacttcttctggagctggatccggcagcccccagggaagggactggagtggattgggtatatgtcctacggagggaacaccaattacaacccctccctcaagagtcgagtcaccatatcaatagacacgtccaagaaccagttctccctgaagctgagctctgtgaccgctgcggacacggccgtctattactgtgcgagagaaacgtattactatgatagaagtggttattattcctctgacggatttgactactggggacagggaatcctggtcaccgtctcctca

SEQ ID NO: 482 - DNA, 325 bp, Artificial Sequence
  Synthetic
gaaattgtgttgacgcagtctccaggcaccctgtctttgtctccaggggaaagagccaccctctcctgcagggccagtcagagtattaccagcagctccttagcctggtaccagcagaaacgtggccaacctcccaggctcctcatctatggtgcatccagcagggccactggcatcccagacaggttcagtggcagtgggtctgggacagacctcactctcacaatcagcagactggagcctgaagattttgcagtgtattactgtcagcagtatggtaactcaccgtacacttttggccaggggaccaagctggagatcaaac

SEQ ID NO: 483 - DNA, 375 bp, Artificial Sequence
  Synthetic
cagctgcagctgcaggagtcgggcccaggactggtgaagacttcggagaccctgtccctcacctgcactgtctctggtggctccatcagcagcggtaattcctactggggctggatccgccagcccccagggaagggactggagtggattggcgacatatattatagtgggagcaccttctacaacccgtccctcaagagtcgactcaccatatccgtggacacgtccaagaaccagttctccctgaagctgacctctgtgaccgccgcagacacggctgtgtattactgtgcgagacgaggtggccggacacccgttcgttttaattacggtggggacgtctggggccaagggaccacggtcaccgtctcctca

SEQ ID NO: 484 - DNA, 319 bp, Artificial Sequence
  Synthetic
gacatccagatgacccagtctccatcctccctgtctgcttctgtaggagacagagtcaccatcacttgccaggcgagtcaggacattagcaggtatttaaattggtttcaacataaaccaggaaaagcccctaagctcctgatctacgatgcatccaatttggaagcaggggtcccatcaaggttcactggaagtggatctgggacagagtttactttcaccatcagcagcctgcagcctgaagattttgcaatatatttctgtcaacagtatgatagtctcccgctcactttcggcggcgggaccaaggtggagatca

SEQ ID NO: 485 - DNA, 364 bp, Artificial Sequence
  Synthetic
caggtgcagctggtgcagtctggggctgaagtgaagaaacctggggcctcagtgaaggtctcctgcaaggcttctggatacatattcaccggcttctatatgcactgggtgcgacaggcccctggacaagggcctgagtggatgggatggatcaaccctaacagtggtggcacaaactatgcacagaagtttcagggcagggtcaccatgaccagggacacgtccatcagcacagcctacatggagctgagcaggctgagatctgacgacacggccctgtattactgtgcgagaggtggccaagatgagctcaccggcacttttgatgtctggggccaagggacaatggtcaccgtctcttcag

SEQ ID NO: 486 - DNA, 315 bp, Artificial Sequence
  Synthetic
tcctatgagctgactcagccaccctcagtgtcattggccccaggaaagacggccagtattacctgtgggggagacagcattggaagtaaaagtgtacactggtaccaacagaggccaggccaggcccctatactggtcatctattatgatggcgaccggccctcagggatccctgaacgattctctggctccaactctgggaacacggccaccctgaccatcagcagggtcgaagccggggatgaggccgactattactgtcaggtgtgggatggtggttgggtgttcggcggagggaccaagctgaccgtccta

SEQ ID NO: 487 - DNA, 365 bp, Artificial Sequence
  Synthetic
caggtgcagctgcaggagtcgggcccaggactggtgaaggcttcacagaccctgtccctcacctgcactgtctctggtggctccttccgcagtggtggttactactacaactggatccgccagcacccagggaagggcctggagtggattggatatatcttttatactggggtcacctattacaacccgtccctcaagagtcgcgtttccatatcagtggacacgtctaagaaccagctctccctgaacctgacctctgtgactgccgcggacacggccgtgtattactgtgcgaggggttcctacagtgactacaatgggggctgggactactggggccggggaaccctggtcaccgtctcctc

SEQ ID NO: 488 - DNA, 327 bp, Artificial Sequence
  Synthetic
cagtctgccctgactcagcctccctccgcgtccgggtctcctggacagtcagtcaccatctcctgcattggaaccagcagtgacgttggtggttataactatgtctcctggtaccaacaccacccaggcaaagcccccaaactcatcatttatgaggtcagtaagcggccctcaggggtccctgatcgcttctctggctccaagtctggcaacacggcctccctgaccgtctctgggctccaggccgacgatgaggctgattattactgcagctcatatgcgggcagcaacaattgggtgttcggcggagggaccaagctgaccgtc

SEQ ID NO: 489 - DNA, 355 bp, Artificial Sequence
  Synthetic
gaggtgcagctggtggagtctggaggaggcttgatccagcctggggggtccctgagactctcctgtgcagcctcggggatcaccgtcagtagcaactatatgaactgggtccgccaggctccagggaaggggctggagtgggtctcagttctttatgccggtggtagtacattttacgcagactccgtgaagggccgattcaccatctccagagacgattccaagaacacactgtatcttcaaatggacagcctgagagccgaggacacggccgtgtattactgtgcgagagatctaagcagtagcgggggatttgactactggggccagggaaccctggtcaccgtctcctcag

SEQ ID NO: 490 - DNA, 322 bp, Artificial Sequence
  Synthetic
gaaattgtgttgacgcagtctccaggcaccctgtctttgtctccaggggaaagagccaccctctcctgcagggccagtcagagtgttagcagcagctacttagcctggtatcagcagaaacctggccaggctcccaggctcctcatctatggtgcatccagcagggccactggcatcccagacaggttcagtggcagggggtctgggacagacttcactctcaccatcagcagactggagcctgaagattttgcagtgtattactgtcagcagtatggtagcttgtacacttttggccaggggaccaagctggagatcaaac

SEQ ID NO: 491 - DNA, 382 bp, Artificial Sequence
  Synthetic
caggtgcagctggtggagtctgggggaggcgtggtccagcctgggaggtccctgagactctcctgtgcagcctctggattcgcattcagtacctatggtatgcactgggtccgtcagactccaggcaaggggctggcgtgggtggcggctatttcatatgatggacgtaatacatactacggagactccgtgaagggccgattcaccattaccagagacaattccaagaacacgctgtatttgcaactgaacagtctgagagatgaggacacggctctgtattattgtgcgagagatgcgactatgattactctggttcggggaattatgggaccaccctttgatcactggggccagggatccctggtcaccgtctcctcag

SEQ ID NO: 492 - DNA, 382 bp, Artificial Sequence
  Synthetic
caggtgcagctggtggagtctgggggaggcgtggtccagcctgggaggtccctgagactctcctgtgcagcctctggattcaccttcagtagctatggcatgcactgggtccgccaggctccaggcaaggggctggagtgggtggcagttatatcatatgatggaagtaataaatactatgcagactccgtgaagggccgattcaccatctccagagacaattccaagaacacgctgtatctgcaaatgagcagcctgagagctgaggacacggctgtgtattactgtgcgaagcaaatcggggaatattgtagtggtggtagctgctaccaggggagtcttgactactggggccagggaaccctggtcaccgtctcctcag

SEQ ID NO: 493 - DNA, 382 bp, Artificial Sequence; identical to SEQ ID NO: 492
  Synthetic

SEQ ID NO: 494 - DNA, 322 bp, Artificial Sequence
  Synthetic
gacatccagatgacccagtctccatcctccctgtctgcatctgtaggagacagagtcaccatcacttgccaggcgagtcaggacattagcaactatttacattggtatcagcagaaaccagggaaagcccctaagctcctgatctacgatgcatccaatttggaaacaggggtcccatcaaggttcagtggaagtggatctgggacagattttactttcaccatcagcagcctgcagcctgaagatattgcaacatattactgtcaacagtatgataatctcccattcactttcggccctgggaccaaagtggatatcaaac

SEQ ID NO: 495 - DNA, 373 bp, Artificial Sequence
  Synthetic
caggtgcagctgcaggagtcgggcccaggactggtgaagccttcacagaccctgtccctcacctgcactgtctctggtggctccatcagcagtggtggttactactggagctggatccgccagcacccagggaagggcctggagtggattgggtacatctattacagtgggagcacctactacaacccgtccctcgagagtcgagttaccatatcagtagacacgtctaagaaccagttctccctgaagctgagctctgtgactgccgcggacacggccgtgtattactgtgcgagcggggaactctccgcgttcggggagttatttccgcacgactactggggccagggaaccctggtcaccgtctcctcag

SEQ ID NO: 496 - DNA, 322 bp, Artificial Sequence
  Synthetic
gaaattgtgttgacacagtctccagccaccctgtctttgtctccaggggaaagagccaccctctcctgcagggccagtcagagtgttagcacctacttagcctggtaccaacagaaacctggccaggctcccaggctcctcatctatgatgcatccaacagggccactggcatcccagccaggttcagtggcagtgggtctgggacagacttcactctcaccatcagcagcctagagcctgaagattttgcagtttattactgtcagcagcgtagcaactggctattcactttcggccctgggaccaaagtggatatcaaac

SEQ ID NO: 497 - DNA, 361 bp, Artificial Sequence
  Synthetic
caggtgcagctggtggagtctgggggaggcgtggtccagcctgggaggtccctgagactctcctgtgcagcctctggattcaccttcagtagctatgctatgcactgggtccgccaggctccaggcaaggggctggagtgggtggcagttatattatatgatggaagcaataaatactacgcagattccgtgaagggccgattcaccatctccagagacaattccaagaacacgctgtatctgcaaatgaacagcctgagagctgaggacacggctgtgtattactgtgcgagagatcaggggatggctacaacctactttgactactggggccagggaaccctggtcaccgtctcctcag

SEQ ID NO: 498 - DNA, 325 bp, Artificial Sequence
  Synthetic
gacatccagatgacccagtctccatcctccctgtctgcatctgtaggagacagagtcaccatcacttgccgggcaagtcagagcattagcagctatttaaattggtatcagcagaaaccagggaaagcccctaagctcctgatctatgctgcatccagtttgcaaagtggggtcccatcaaggttcagtggcagtggatctgggacagatttcactctcaccatcagcagtctgcaacctgaagattttgcaacttacttctgtcaacagagttacaatacccctccgtggacgttcggccaagggaccaaggtggagatcaaac

SEQ ID NO: 499 - DNA, 368 bp, Artificial Sequence
  Synthetic
caggtgcagctggtgcagtctggggctgagctgaagaagcctggggcctcagtgagggtctcctgcaaggcttctggatacaccttcaccgactactatatccactgggttcgacaggcccctggacaagggtttgagtggatgggctggatcaaccctgacagtggtggcacaaactatccacagaactttcagggcagggtcaccatgaccaggggcacgtccatcagcacagcctacgtggaactgaccaggctgagatttgacgacacggccgtgtattactgtgcgaggacgtcctccccccatagcagctcgacaggggaccttgactactggggccagggaaccctggtcaccgtctcctc

SEQ ID NO: 500 - DNA, 331 bp, Artificial Sequence
  Synthetic
tcctatgagctgactcagtcaccctcagtgtcagtggccccaggaaagacggccaggattacctgtgggggaagggacattggaagtaaaagtgtgcactggtaccagcagaggccgggccaggcccctgtgctggtcatctcttatgataatgaccggccctcagggatccctgagcgattctctggctccaactctgggaacacggccaccctgaccatcagcagggtcgaagccggggatgaggccgactattactgtcaggtgtgggacggtactggtgatcacccgggatgggtgttcggcggagggaccaggctgaccgtcctag

SEQ ID NO: 501 - DNA, 364 bp, Artificial Sequence
  Synthetic
caggtgcagctggtgcagtctggggctgaggtgaagaagcctggggcctcagtgaaggtctcctgcaaggcttctggatacaccttcaccggctactatatgcactgggtgcgacaggcccctggacaagggcttgagtggatgggatggatcaaccctaacagtggtggcacaaactatgcacagaagtttcagggcagggtcaccatgaccagggacacgtccatcagcacagcctacatggagctgagcaggctgacatctgacgacacggccgtgtattactgtgcgagaggtggccaagatgagctcaccggcgcttttgatatctggggccaagggacaatggtcaccgtctcttcag

SEQ ID NO: 502 - DNA, 316 bp, Artificial Sequence
  Synthetic
tcctatgagctgactcagccaccctcagtgtcagtggccccaggaaagacggccaggattacctgtgggggaaacagcattggaagtaaaagtgtgcactggtaccagcagaagccaggccaggcccctgtgctggtcatctattatgatagcgaccggccctcagggatccctgagcgattctctggctccaactctgggaacacggccaccctgaccatcagcagggtcgaagccggggatgaggccgactttcactgtcaggtgtgggatagtggttgggtgttcggcggagggaccaagctgaccgtcctag

SEQ ID NO: 503 - DNA, 367 bp, Artificial Sequence
  Synthetic
caggtgcagctgcaggagtcgggcccaggactggtgaagccttcacagaccctgtccctcacctgcactgtctctggtggctccatcagcagtggtggttactactggggctggatccgccagcacccagggaagggcctggagtggattgggtacatctattacagtgggagcacctactacaacccgtccctcaagagtcgagttaccatatcagtagacacgtctaagaaccagttctccctgaagctgagctctgtgactgccgcggacacggccgtgtattactgtgcgaggggttcctacagtaactacaatggggggttggactactggggccagggaaccctggtcaccgtctcctcag

SEQ ID NO: 504 - DNA, 331 bp, Artificial Sequence
  Synthetic
cagtctgccctgactcagcctccctccgcgtccgggtctcctggacagtcagtcaccatctcctgcactggaaccagcagtgacgttggtggttataactatgtctcctggtaccaacagcacccaggcaaagcccccaaactcatgatttatgaggtcagtaagcggccctcaggggtccctgatcgcttctctggctccaagtctggcaacacggcctccctgaccgtctctgggctccaggctgaggatgaggctgattattactgcagctcatatgcaggcagcaacaattgggtgttcggcggagggaccaagctgaccgtcctag

SEQ ID NO: 505 - DNA, 373 bp, Artificial Sequence
  Synthetic
caggtgcagctgcaggagtcgggcccaggactggtgaagccttcacagaccctgtccctcacctgcactgtctctggtgcctccatcagcagtagtgaacactactggagttggatccgccagcccccagggaagggcctggagtggattgggtacatctcttatagtgggggcacctaccaaaacccgtccctccagagtcgaatgaccctgtcaatggacgcgtccaagaaccagttctccctgaagttgagctctgtgactgccgcagacacggccgtgtatttctgtgccagactaaatactatgatcgtcatgatcaatggtgtttttgatgtctggggccaagggacaatggtcaccgtctcttcag

SEQ ID NO: 506 - DNA, 325 bp, Artificial Sequence
  Synthetic
gacatccagatgacccagtctccatcctccctgtctgcatttgtaggagacagagtcaccatcacttgccaggcgagtcaggacatcaataagtatgtaaattggtatcagcagaaaccagggaaagcccctaagctcctgatctacgatgcatccaatttgcaaacaggggtcccatcaaggttcagtggaagtggatctgggacacattttactttcaccatcagcagcctgcagcctgaagattttgcaacatattactgtcaagaatatgataatctcttttcgattagtttcggccaagggacacgactggagattaaac

SEQ ID NO: 507 - DNA, 369 bp, Artificial Sequence
  Synthetic
gaggtgcagctgttggagtctgggggaggcttggtacggccgggggggtccctgagactctcctgtgcagcctctggattcatctttggcagctatgccatgacctgggtccgccaggctccagggaaggggctggagtgggtctctactattagtggtggtggaacttccacagactacgcagactccgtgaagggccatttcaccatctcaagagacaatggcaagaacacactgtatctgcaaatgaacagcctgagagccgaggacacggccgtatattactgtgtgaaagagagtgattattatatggccagtgtgaacggtatggacgtctggggccatgggaccacggtcaccgtctcctca

SEQ ID NO: 508 - DNA, 325 bp, Artificial Sequence
  Synthetic
gaaattgtgttgacgcagtctccaggcaccctgtctttgtctccaggggaaagagccaccctctcctgcagggcccgtcagggtgttagcagcacctacttagcctggtaccagcagaaacctggccaggctcccaggctcctcatctacggtgcatccagcagggccactggcatcccagacaggttcagtggcagtgggtctggggcagacttcacactcaccatcagcagactggagcctgaagattttgcagtatattactgtcagcagtatggtacctcaccgtacacttttggccaggggaccaagctggagatcaaac

SEQ ID NO: 509 - DNA, 370 bp, Artificial Sequence
  Synthetic
caggtgcagctggtgcagtctgggcctgaggtgaagaagcctgggacctcagtgaaggtctcctgcaaggcctttcaattaagttttagtgtctctgctgtgcagtgggtgcgacaggctcgtggacaacgccttgagtggataggatggatcgtcgttggcagtggcaacacaaactacgcacagaagttccaggaaagagtcaccattaccagggacatgtccacaagtacagtctatatggaggtgcgcagtctaagatccgaggacacggccgtgtattattgtgcggcgccccaatgtaatcgcaccacctgttatgatgcttttgatatgtggggccaagggacaatggtcaccgtctcttcag

SEQ ID NO: 510 - DNA, 325 bp, Artificial Sequence
  Synthetic
gaaattgtgttgacgcagtctccaggcaccctgtctttgtctccaggggaaagagccaccctctcctgcagggccagtcagagtgttaacagcaactatttagcctggtaccagcaaaaacctggccaggctcccaggctcctcatctttggtccatccaacagggccactggcatcccagacaggttcagtggcagtgggtctgggacagacttcactctcaccatcagtagactggagtctgaagattttgcagtgtattactgtcaacaatatggtagctcaccgtggacgttcggccaagggaccaaggtggaaatcaaac

SEQ ID NO: 511 - DNA, 361 bp, Artificial Sequence
  Synthetic
gaggtgcagctgttggagtctgggggaggcttggtacagccgggggggtccctaagactctcctgtgtagcctctagattcatctttagcagatatgccttgagctgggtccgccaggctccagggaaggggctggagtgggtctcaggtattagtggtagtggtcatagcacacactacgcagactccgtgacgggccggttcaccatctccagagacaattccaagaacacggtgtatctgcaaatgagcagcctgagagccgaggacacggccgtatattactgtgcgaaaggcccgaggagtaactacgactactttgagtcctggggccagggaaccctggtcaccgtctcctcag

SEQ ID NO: 512 - DNA, 322 bp, Artificial Sequence
  Synthetic
gacatccagttgacccagtctccatcctccctgtctgcatctgtcggagacagagtcaccatcacttgccgggcaagtcagggcattagcagtgctttagcctggtatcagcagagaccagggaaagctcctaggctcctgatctatgatgcctccagtttggatagtggggtcccatcaaggttcagcggcagtggatctgggacagatttcactctcaccatcagcagcctgcagtctgaagactttgcaacttattactgtcaacagtttattaataacccgctcactttcggcggagggaccaaggtggaaatcaaac

SEQ ID NO: 513 - DNA, 361 bp, Artificial Sequence
  Synthetic
gaagtgcagctggtggagtctgggggaggcttggtacagcctggcaggtccctgagactctcctgtgtagcctctggattcgaatttgaagattatggcatgcactgggtccggcaagttccagggaagggcctggagtgggtctcaggtattagttggaacagtgctagtgtaggctatgcggactctgtgaggggccgattcaccatctccagagacaacgccaagaactccctgtatctgcaaatgaacagtctgagagctgaggacacggccttatattactgtggaaaacagataaatgagtggtcacacttccttgactactggggccagggaaccctggtcaccgtctcctcag

SEQ ID NO: 514 - DNA, 322 bp, Artificial Sequence
  Synthetic
gacatccagttgacccagtctccatcttctgtgtctgcatctgtaggagacagagtcaccatcacttgtcgggcgagtcagggtattagcaactggttagcctggtatcagaagaaaccagggaaagcccctaaactcctgatctatgctacatccagtttgcaaagtggggtcccatcaaggttcagcggcagtggatctgagacagatttcactctcactatccgcagcctgcagcctgaagattttgcaacttactattgtcaacaggctaacagttaccccttaacttttggccaggggaccaagctggagatcaaac

SEQ ID NO: 515 - DNA, 364 bp, Artificial Sequence
  Synthetic
caggtgcagctgcaggagtcgggcccaggactggtgaagtcttcagagaccctgtccctcacctgcactgtctcgagtggctccgtcaggagtggtggttactactggagttggatccgccaccacccagggaagggcctggagtggattggctacatcttttacactggcatcacctactacaacccgtccctcaagagtcgagttattgtgtcagtggacccgtctaagaaccaattctccctgaacctgacctctgtgactgccgcggacacggccgtctattactgtgcgagtacgccttatactaatggcggggcttttcatatctggggccaagggacaatggtcaccgtctcttcag

SEQ ID NO: 516 - DNA, 330 bp, Artificial Sequence
  Synthetic
cagtctgccctgactcagcctccctccgcgtccgggtctcctggccagtcagtcaccatctcctgcactggcaccagcagtgacgttggtggtcataactatgtctcctggtaccaacaattcccaggcaaagcccccaaactcatcatttatgatgtcaataagcggccctcaggggtccctgatcgcttctctggctccaagtctgccaacacggcctccctgaccgtctctgggctccaggctgaggatgaggctgattatcactgcagctcatatgccggcagcaacaattgggtgttcggcggagggaccaagctgaccgtccta

SEQ ID NO: 517 - DNA, 385 bp, Artificial Sequence
  Synthetic
caggtgcagctgcaggagtcgggcccaagactggtgaagccttcggagaccctgtccctcacctgcattgtctccggtggctccgtcagtagtaataatttctactggagttggatccggcagcccccagggaagcgactggagtggattgggtatttctataacagtgggagctccaagtataatccctccctgaagagtcgagtcaccatatcaggagacacgtccaagaaccagttctccctgaagctgtcctctgtgaccgctgcggacacggccgtgtattactgtgcgagagaaacgtttttctatgacaggactggtcattacaaatccgatggttttgatgtctggggccaagggacaatggtcaccgtctcttcag

SEQ ID NO: 518 - DNA, 322 bp, Artificial Sequence
  Synthetic
gacatccagatgacccagtctccttccaccctgtctgcatctgtgggagacagagtcaccatcagttgccgggccagtcagaatattagtagctggttggcctggtatcagcaagaagcagggaaagcccctaagctcctgatctataaggcgtctagtttagaaagtggggtcccatcgaggttcagcggcagtggatctgggacagagttcactctcaccatcagcagcctgcagcctggtgattttgcaacttattactgccaacagtataatatttattcgtacacttttggccaggggaccaagctggagatcaaac

SEQ ID NO: 519 - DNA, 361 bp, Artificial Sequence
  Synthetic
caggtgcagctggtggagtctgggggaggcgtggtccagcctgggacgtccctgagactctcctgtgcagcgtctggattcaccttcagtagctttggcatgaactgggtccgccaggctccaggcaagggcctggagtgggtggcagttatattctttgatgggagtaaaacatattatgcagactccgtgaagggccgattcaccatctccagagacaactccaagaacacgctgtatctgcaaatgaacagcctgagaactgaggacacggctgtgtattactgtgcgaaggggcaactgcgtttgggggagttcgatgactactggggccagggaaccctggtcaccgtctcctcag

SEQ ID NO: 520 - DNA, 322 bp, Artificial Sequence
  Synthetic
gacatccagatgacccagtctccatcctccctgtctgcatctgttggagatagagtcaccatcacttgccgggcaagtcaggacattagagatgatttaaactggtatcaacacaaaccagggaaagccccgaaactcctgatctatactgcatccagtttacaaagtggggtcccatcaaggttcagcggcagtggatctggcacagatttcactctcaccatcagcaggctgcagcctgaggattttgcaagttattactgcctacaggatcacaattacccgctcacttttggccaggggaccaagctggagatcaaac

SEQ ID NO: 521 - DNA, 360 bp, Artificial Sequence
  Synthetic
gaggtgcagctggtggagtctgggggaggcttggtacagcctgggaagtccctgagactctcctgtgcaggctctggattcgccttcagttcctatcacatgaactgggtccgccaggctccagggaagggtctggagtgggttgcatatattagtagtggaagtagtaccatacactacgcagactctgtgaagggccgattcaccatctccagggacaatgccaagaactcattctatctgcaaatgaacagcctgagagccgaggacacggctctgtattactgtgcgagagctatagtgggaacgaagggttacatggacgtctggggcaaggggaccacggtcaccgtctcctca

SEQ ID NO: 522 - DNA, 328 bp, Artificial Sequence
  Synthetic
cagtctgccctgactcagcctgcctccgtgtctgggtctcctggacagtcagtcaccatctcctgcactggaacccgcagtgatgttgggagttatgaccttgtctcctggtaccaactccacgcagacaaggcccccaaactcataatttatgaggtcacttcgcggccctcaggaatttctactcggttctctggctccaagtctggcaacacggcctccctgacaatctctgggctccaggctgaggacgaggcggattattactgctgctcatatgcaggtactacatggctgttcggcggagggaccaggctgaccgtcctag

SEQ ID NO: 523 - DNA, 375 bp, Artificial Sequence
  Synthetic
caggtgcagctggtggagtctgggggaggcttggtcaagcctggagggtccctgagactctcctgtgcagcctctggattcaccttcagcgactactgcgtgacctggatccgccaggctccagggaaggggctggagtggctttcatacagtaatactaatgatagtagtagatcctacgcagactctgtgaagggccgcttcaccatctccagggacaacgccaagaattcactgtatctgcaaatggacagcctgagagccgaagacacggccgtgtattactgtgcgagaaggggggacggaaacgtcccgctcttccattattactatatggacgtctggggcaaagggaccacggtcaccgtctcctca

SEQ ID NO: 524 - DNA, 331 bp, Artificial Sequence
  Synthetic
cagtctgtgctgactcagccaccctcagcgtctgggaccgccgggcagagggtcaccatctcttgttctggaggcagctccaacatcggaagtaatactgtacactggtaccaacaactcccaggaacggcccccaaactcctcatctatagcaattacaagcggccctcaggggtccctgaccgattctctggctccaagtctggcgcctcagcctccctggccatcagtgggctccagtctgaggatgaggctgaatattactgtgcagcatgggacgacagtgcgaatggtccgatattcggcggagggaccaaactgaccgtcctag

SEQ ID NO: 525 - DNA, 394 bp, Artificial Sequence
  Synthetic
gaggtgcagctggtggagtctggaggaggcttgatccagacgggggggtccctgaaactctcctgtgcagcctctggattcatcgtcactaataactacatgagttgggtccgccaggctcccgggaaggggctggagtgggtctcagtgatttatagtggtggtaccacatattatgcagactccgtgaaggggcgattcaccatctccagagacatttcgaagaacacgttgtatcttcaaatgaacagcctgaaagccgaggatacggccgtgtattattgtgcgagagagggggacgtagaagggatttccgattcctggagtggttactctagagaccgctactattttgaccactggggccagggaaccctggtcaccgtctcctcag

SEQ ID NO: 526 - DNA, 331 bp, Artificial Sequence
  Synthetic
cagtctgccctgactcagcctgcctccgtgtctgggtctcctggacagtcgatcaccatctcctgcactggaaccagcagtgacgttggtggttataactatgtctcctggtaccaacaacacccaggcaaagcccccaaactcatgatttatgatgtcagtaatcggcccccaacgatttctaatcgcttctctggctccaagtctggcaatacggcctccctgattatctctgggctccagcctgaggacgaggctgattattattgcagctcatttacaagcaacaacactcgagtcttcggaactgggaccaaggtcaccgtcctag

SEQ ID NO: 527 - DNA, 394 bp, Artificial Sequence
  Synthetic
gaggtgcagctggtggagtctggaggaggcttgatccagcctggggggtccctgagactctcctgtgcagcctctgggttcatcgtcagcaacaattacatcagctgggtccgccaggctccagggaaggggctggagtgggtctcagtcatttatagcggtggaacgacatactacgcagactccgtgaagggccgattcagcatctccagagacacttccaagaacacagtatatcttcaaataaacaacctgagagccgaggacacggccgtgtattattgtgcaagagagggggacgtagacgggaattacggtttttggagtggatattctagagaccgttattactttgactactggggccagggaaccctggtcaccgtctcctcag

SEQ ID NO: 528 - DNA, 330 bp, Artificial Sequence
  Synthetic
cagtctgccctgactcagcctgcctccgtgtctgggtctcctggacagtcgatcaccatctcctgcactggaaccagcagtgacgttggtgcttacaactatgtcgcctggtaccaacagcacccaggcaaagcccccaaactcatggtttatgatgtcagtaaacggccctcaggggtttctaatcgcttctctggctccaagtctggcaacacggcctccctgaccatctctgggctccagactgaggacgagggtgattattactgctgctcttatacaaccaacaccactcgagtcttcggaactgggaccatgctcaccgtccta

SEQ ID NO: 529 - DNA, 391 bp, Artificial Sequence
  Synthetic
caggtgcagctggtgcagtctgggcctgaggtgaagaagcctggggcctcagtgaaggtctcctgtaaggcttctggatacatcttcaccgactattctatacactgggtgcgacaggcccctggacaggggcttgagtggatgggatggatcaaccctaatagtggaggcggaaactctgcacagatttttaagggccgggccaccatggccagggacacaagtatcaccacagtttatatggacctgagtgggctgagatctgacgacacggccgtgtactattgtgcgagaggtcccttatttcacaaagtagtctacgaatcttcgagtggctttcatgacggcttggatttctggggccaagggacaatggtcaccgtctcttcag

SEQ ID NO: 530 - DNA, 329 bp, Artificial Sequence
  Synthetic
cagtctgccctgactcagcctgcctccgtgtctgggtctcctggacagtcggtcaccatctcctgcactggaaccagcagtgacgttggtggttacaactttttgtcctggtatcaacaacacccaggcaaagcccccaaactcctgctttatgaggtcattaatcggccctcaggggtctctgatcgcttctctggctccaagtctggcaacacggcctccctgaccatctctgggctccaggctgaggacgaggctgattattactgcaactcatatacaagcaacttcacttgggtgttcggcggagggacccacctgaccgtcct

SEQ ID NO: 531 - DNA, 367 bp, Artificial Sequence
  Synthetic
caggtgcagctggtggagtctgggggaggcctggtcaagcctggggggtccctgagactcacctgtgcagcctctggattcaccttcagtacctatagcatgaactgggtccgccaggctccagggaaggggctggagtgggtctcatccattagtagtagtaatagttacatatactacgcagactcagtgaagggccgattcaccatctccagagacaacgccaagaactcactgtatctgcaaatgaacagcctgagagccgaggacacggctgtgtattactgtgcgagagagagggggtattacggtggtaaaacccccccatttcttgggggccagggaaccctggtcaccgtctcctcag

SEQ ID NO: 532 - DNA, 334 bp, Artificial Sequence
  Synthetic
aattttatgctgactcagccccactctgtgtcggagtctccggggaagacggtaaccatctcctgcaccggcagcagtggcagcattgccagcaactatgtgcagtggtaccagcagcgcccgggcagtgcccccaccactgtgatctatgaggataaccaaagaccctctggggtccctgatcggttctctggctccatcgacagctcctccaactctgcctccctcaccatctctggactgaagactgaggacgaggctgactactactgtcagtcttatgatagcagcaattattgggtgttcggcggagggaccaagctgaccgtcctag

SEQ ID NO: 533 - DNA, 375 bp, Artificial Sequence
  Synthetic
caggtgcagctggtgcagtctggggctgaggtgaagcagcctggggcctcagtgaaaatttcctgcaaggcgtccggatacatattcaccacctactttatgcactgggtgcgacaggcccctggacaagggcttgagtggctgggaataatcgaccctactattagtggcgcaagcctcgcacagaagttccagggcagagtcaccatgaccagcgacacgtccacgagcacagtttacatggagatgaggagcctgagatctgacgacacggccctttatttttgtgctagagcgtcgacttcgactagtagttggagcgaggccctgtccttgggctcctggggccagggaaccctggtcaccgtctcctca

SEQ ID NO: 534 - DNA, 340 bp, Artificial Sequence
  Synthetic
cagtctgtgctgacgcagccgccctcagtgtctggggccccggggcagggggtctccatctcctgcactgggagcagctccaacgtcggggcaggttatggtgtacactggtaccaacaacttccaggaacaactcccaaactcctcatctatgataataatagtcggcccgcaggggtccctgaccgattctctggctccaagtctggcacctcagcctccctggccatcgctgggctccagcctgaggatgaggctgattactactgccagtcctgggacaatggcctgagtggttcgggggtggttttcggcggagggaccaaggtgaccgtcctag

SEQ ID NO: 535 - DNA, 352 bp, Artificial Sequence
  Synthetic
gaggtgcagctggtggagtctggaggaggcttgatccagcctggggggtccctgagactctcctgtgcggcctctgaatttgtcatcagcaggaactacatgagttgggtccgccaggctccaaagaaggggctggagtgggtctcagttctttatagtggtggtagcacattctacgctgactccgtaaagggccgattcaccatctccagagacgattccaggaatatgttgtatcttcaaatgaacagcctgagagccgaagacacggccgtctattattgtgttagagattttggagagttctactttgactactggggccagggagtcctggtcaccgtctcctcag

SEQ ID NO: 536 - DNA, 322 bp, Artificial Sequence
  Synthetic
gaaatagtgatgacgcagtctccaaccaccctgtctgtgtctccaggggaaagagccaccctctcctgcagggccagtcagagtcttagtagcaacttagcctggtaccagcagaaacctggccaggctcccaggctcctcatctttggtgtatccaccagggccactggtatcccagccaggttcagtggcagtgggtctgggacagagttcactctcaccatcagcagcctgcagtctgaagattttgcagtttactactgtcagcagtactatagtgggcctcggacgttcggccaagggaccaaggtggagatcaaac

SEQ ID NO: 537 - DNA, 351 bp, Artificial Sequence
  Synthetic
gaggtgcagctggtggagtctggaggaggcttgatcccgcctggggggtccctgagactctcctgtgcagcctcagggatcatcgtcagtcgcaactacatgagctgggtccgccagactccagggaaggggctggagtgggtctcagttatgtatgccggtggtaccaaagagtacgcagactccgtgaagggccgattcatcatctccagagacgattccaacaacactctctatcttcaaatgaatagcctgagagccgaggacacggccgtgtattactgtgcgagagatctgattgtccttggggtggacgtctggggccaagggaccacggtcaccgtctcctca

SEQ ID NO: 538 - DNA, 325 bp, Artificial Sequence
  Synthetic
gacatccagttgacccagtctccatccttcctgtctgcatctgtaggagacagagtcaccatcacttgccgggccagtcagggcattagcaattatttagcctggtatcagcaaaaaccagggaaagcccctaagctcctgatctatgctgcatccactttgcagagtggggtcccatcaaggttcagcggcagtggatctgggacagaattcactctcacaatcagcagcctgcagcctgaagattttgcaacttattactgtcaactgcttaatagttaccccatgtgcagttttggccaggggaccaagctggagatcaaac

SEQ ID NO: 539 - DNA, 367 bp, Artificial Sequence
  Synthetic
gaggtgcagctggtggagtctgggggaggcttggtccagcctggggggtccctgagactttcctgttcagtctcaggcttcaccttcagtaactttgctatgcactgggtccgccaggctccagggaagggactggaatttgtttcaggtgtaagtagtgatggggatatcacagactacgcagactccgtgaagggcagattcaccatctccagagacaattccaagaacactctatatcttcaaatgagcagtctgagacctgaggacacggctgtgtattattgtgtgaaggataaggagcattcaactatggttactatctttgacttttggggccagggaaccctggtcaccgtctcctcag

SEQ ID NO: 540 - DNA, 322 bp, Artificial Sequence
  Synthetic
gacatccagatgacccagtctccatcctccctgtctgcatctgtgggagacagagtcaccatcacttgccgggcaagtcagagcattagcagctttttaaattggtatcagcagaaaccagggaaagcccctaagctcctgatctatgctgcatccagtttgcaaagtggggtcccatcgaggttcagtggccgtggatctggggcagatttcactctcaccatcaccagtctgcaacctgaagattttgcaacttacttctgtcaacagagttacagttcccacctcactttcggccctgggaccaaagtggatatcaaac

SEQ ID NO: 541 - DNA, 364 bp, Artificial Sequence
  Synthetic
caggtgcagctgcaggagtcgggcccagggctggtgaagccctcacagaccctgtccctcacttgcggtgtctctggtgactccatcagtagtggtggtcatttctggagctgggtccggcagcacccagggacgggcctggagtggattgcctacagccctttcagtgggaccacctactacaacccgtccctcaagagtcgagtgaccctttcagtagacacgtcgaagaaccagtttttcctgagcttgacttctgtaactgacgcggacacggccgtctatttctgtgcgagagttaaggggtggctgaggggctactttgaccactggggccagggagtcctggtcaccgtctcctcag

SEQ ID NO: 542 - DNA, 332 bp, Artificial Sequence
  Synthetic
aattttatgctgactcagccccactctgtgtcggagtctccggggaagacggtgaccatctcctgcaccgcctccagtggcaacattgtcaacaactatgtgcagtggtaccagcagcgcccgggcagtgcccccatcattgtgatctatgaagatgcccaaagaccctctggggtccctgatcggttctctggctccatcgacacctcctccaattctgcctccctcaccatctctggactgaagactgaggacgaggctgactactactgtcagtcttatgagatcgacagtcatgtcgtcttcggcggtgggaccagactgaccgtcct

SEQ ID NO: 543 - DNA, 355 bp, Artificial Sequence
  Synthetic
caggtgcagctacagcagtggggcgcaggactgttgaagccttcggagaccctgtccctcacctgcgctgtttatggtgggtccttcagtgattactactggagttggatccgccagcccccagggaagggcctggagtggattggggaaaacaatcatagtggaaaaaccaactacaacccgtccctcgagaatcgagtcaccatatcagtggacacgtccaagaatcagttctccctgaaattgacctctgtgaccgccgcggacacggctgtgtattactgtgcgagagagagtgggagctacggcacctttgactactggggccagggaaccctggtcaccgtctcctcag

SEQ ID NO: 544 - DNA, 325 bp, Artificial Sequence
  Synthetic
gaaattgtgttgacgcagtctccaggcaccctgtctttgtctccaggggaaagagccaccctctcctgcagggccagtcagagtgtaagtagcgcctacttagcctggtaccagcaaaaacctggccaggctcccaggctcctcatctatggagcttccagcagggccactggcatcccagacaggttcagtggcagtgggtctgggacagacttcactctcaccatcagcagactggagcctgaagattttgcagtgtatttctgtcagcagtatgcttatacaatctggacgttcggccaagggaccaaggtggaaatcaaac

SEQ ID NO: 545 - DNA, 364 bp, Artificial Sequence
  Synthetic
gaggtgcagctggtggagtctggaggaggcttgatccagcctggggggtccctgaggctctcatgtgcagtctctggcgtcgccgtcagtaccaactacatgagctgggtccgccaggctccagggcagggactggagtgggtctcaactatttatagcggtgacaccacgtactactcagactccgtgaagggccgattcaccatctccagagacaattccaagaacactttctatcttcaaatgaacagcctgagagtccctgacacggccgtgtattactgtgcgagactggggggagtatttaatggattcaacggatcctttgattattggggccagggaaccctggtcaccgtctcct

SEQ ID NO: 546 - DNA, 331 bp, Artificial Sequence
  Synthetic
cagtctgccctgactcagcctgcctccgtctctgggtctcctggacagtcgatcaccatctcctgcattggaaccagcagtgattttgaaaattataaccttgtctcctggtaccaacaacacccaggcaaagcccccaaagtcatgatttatgaggacactaagcggccctcaggggtttctaatcgcttctctggttccaagtctgccaacacggcctccctgacaatctctgggctccaggctgaggacgaggctgaatattactgctgctcatatgcaggtgccagcacttgggtgttcggcggagggaccagggtgaccgtcgtag

SEQ ID NO: 547 - DNA, 361 bp, Artificial Sequence
  Synthetic
caggtgcagctggtggagtctgggggaggcgtggtccagcctgggaggtccctgagactctcctgtgcagcgtctggattcactttcattagatacaacatgcactgggtccgccaggctccaggcaaggggctggagtgggtggcagttatatggtatgatggaagtaataaatactatgcggactccgtgaagggccgattcaccatctccagagacaattccaagaataccttgtatctgcaaatgaacagcctgagagccgaggacacggctgtgtattattgtgcgagagatcctatgatagtagtggtcgaaatggactactggggccagggaaccctggtcaccgtctcctcag

SEQ ID NO: 548 - DNA, 337 bp, Artificial Sequence
  Synthetic
gatgttgtgatgactcagtctccactctccctgcccgtcacccttggacagccggcctccatctcctgcaactctagtcaaagcctcgtacacactgatggaaacacctacttgaattggtttcagcagaggccaggccaatctccaaggcgcctcatttataaggtttctaaccgggactctggggtcccagacagattcagcggcagtgggtccgacactgatttcacactgcaaatcagcagggtggaggctgacgatgttggcgtttattactgcatgcaaggttcacactggccgtacacttttggccaggggaccaagctggagatcaaac

SEQ ID NO: 549 - DNA, 355 bp, Artificial Sequence
  Synthetic
caggtgcagctacagcagtggggcgcagggctgctgaagccttcggagaccctgtccctcacctgcgttgtctatggtgggtccttcagtgcttactactggagctggatccgccagcccccagggaaggggctggaatggattggggaaatcaatcatagtggaagcaccaactacaagtcgtccctccagagtcgagtcaccatttcagtagacacgtccaagaaccagttctccctgaagctgagctctgtgaccgccgcggacacggctgtctattattgtgcgagagagactgggacctacggcacgtttgaccactggggccagggaactctggtcaccgtctcctcag

SEQ ID NO: 550 - DNA, 323 bp, Artificial Sequence
  Synthetic
gaaattgtgttgacgcagtctccaggcaccctgtctttgtctccaggggaaagagccaccctctcctgcagggccagtcagagtgttagcagcacctacttagcctggtaccagcagaaacctggccaggctcccaggctcctcatctatggtgcgtccagcagggccactggcatcccagacaggttcagtggcagtgggtctgggacagacttcactctcaccatcagcagactggagcctgaagattttgcagtgtattactgtcagcagtatgctttttcggtctggacgttcggccaagggaccaaggtggaaatcaa

SEQ ID NO: 551 - DNA, 364 bp, Artificial Sequence
  Synthetic
caggtgcagctgcaggagtcgggcccaggacttgtgaagccttcacagaccctgtccctcacctgcgctgtctctggtgactccatccgtagtggtggttactactggagctgggtccggcagcacccagggaggggcctggagtggattggctacatctatttcagtgggaccacctactacaacccgtccctcaagagtcgagtgaccatttcagtagacacgtctgagaagcagttttccctgaagttgacttctgtaactgacgcggacacggccgtgtatttctgtgcgagagttaaggggtggctaaggggctactttgactactggggccagggagccctggtcaccgtctcctcag

SEQ ID NO: 552 - DNA, 332 bp, Artificial Sequence
  Synthetic
aattttatgctgactcagtcccactctgtgtcggagtctccggggaagacggtaaccatctcctgcaccggcagcagtggcaacattgtcaacaactatgtgcagtggtatcagcagcgcccgggcagtgcccccatcattgtgatctatgaggatacccaaagaccctctggggtccctgatcggttctctggctccatcgacacctcctccaactctgcctccctcaccatctctgggctgaagactgaggacgaggctgactactactgtcagtcttatgatagcggcagtcatgtcgtcttcggcggtgggaccaaactgaccgtcct

SEQ ID NO: 553 - DNA, 367 bp, Artificial Sequence
  Synthetic
gaggtgcagctggtggagtctgggggagacttggtacagcctggggggtccctgagactctcctgtgcagcctctggattcagcgtcacaaccaatgccatggcctgggtccgccaggctccagggaaggggctggagtggatttcatatattaatataggtagtgctaatatacagtatgctgactctgtgaagggccgattcaccatctccagagacaacgccaagaactcactgtatctgcaaatgaatagcctgagagacgaggacacggctgtctattactgtgcgagaggtgattgtactagcagcagttgttatagtttggactactggggccagggagccctggtcaccgtctcctcag

SEQ ID NO: 554 - DNA, 322 bp, Artificial Sequence
  Synthetic
gacatccagatgacccagtctccatcctccctgtctgcatctgtaggggacagagtctccatcacttgccgggcaagtcagaccattaatactcatttaagttggtatctgcagaaaccaggcgaagcccctaggctcctggtctatgctgcatccactttacacagtggggtcccatcaaggttcagtggcagtggatctgggacagatttcactctcaccatcagtagtctgcaacctgaagactttgcaactttctactgtcaacagacttacagattccccctcactttcggcggagggaccaaggtggaaatcaaac

SEQ ID NO: 555 - DNA, 367 bp, Artificial Sequence
  Synthetic
gaggtgcagctggtggagtctgggggagacttggtacagcctggggggtccctgagactctcctgtgcagcctctggattcaccttcactacctatagcatgagctgggtccgccaggctccagggaaggggctggagtggatttcatatattaacagtggtagtgcaaacatacactacgcagactctgtgaagggccgattcaccgtctccagagacaatgccaagaactcactgtatctgcaaatgaatagcctgagagacgaggacacggctgtttattattgtgcgagaggtgattgtcttagcagcagttgttatagtttggactactggggccagggagccctggtcaccgtctcctcag

SEQ ID NO: 556 - DNA, 322 bp, Artificial Sequence
  Synthetic
gacatccagatgacccagtctccatcctccctgtctgcatctgtaggagacagagtcaccatcacttgccgggcaagtcagagcattaccagctatttaagctggtatctgcagaaaccaggggaagcccctaagctcctgatctatgctgcatccattttacaaagtggggtcccatcaaggttcggtggcaatggatctgggacagatttcactctcaccatcagcagtctgcaacctgaagattttgcaactttctactgtcaacagacttaccgttcccccctcactttcggcggggggaccaaggtggagatcaaac

SEQ ID NO: 557 - DNA, 370 bp, Artificial Sequence
  Synthetic
gaggtgcagctggtggagtctgggggaggcttggtccagcctggggggtccctgagactctcctgtgcagcctctggattcaccgtcagtagcaactacatgagctgggtccgccaggctccagggaaggggctggagtgggtctcagttatttatagcggtggtagcgcatactacgcagactccgtgaagggcagattcaccatctccagagacaattccaagaacacgctgtatcttcaaatgaacagcctgagagccgaggacacggctgtgtattactgtgcgagagatcttagggatcaagacgggtacagctatggggcgtttgactactggggccagggaaccctggtcaccgtctcctcag

SEQ ID NO: 558 - DNA, 331 bp, Artificial Sequence
  Synthetic
cagtctgccctgactcagcctgcctccgtgtctgggtctcctggacagtcgatcaccatctcctgcactggaaccagcagtgacgttggtggttataactatgtctcctggtaccaacaacacccaggcaaagcccccaaactcatgatttatgatgtcagtaatcggccctcaggggtttctaatcgcttctctggctccaagtctggcaacacggcctccctgaccatctctgggctccaggctgaggacgaggctgattattactgcagctcatatacaagcagcagctcctgggtgttcggcggagggaccaagctgaccgtcctag

SEQ ID NO: 559 - DNA, 370 bp, Artificial Sequence
  Synthetic
gaggtgcagctggtggagtctgggggaggcttggtccagcctggggggtccctgagactctcctgtgcagtctctggattcaccgtcagtagtaattacatgacctgggtccgccaggctccagggaaggggctggagtgggtctcacttatttatagcggcactagtgcattttacgcagactccgtgaagggcagattcaccatctccagagacaattccaagaacacgctgtatcttcagatgagcagtctgagagtcaatgacacggctatatattattgtgcgagagaccttaggaaagatgacgggtacagctatggggcgtttgactactggggccagggaaccctggtcaccgtctcctcag

SEQ ID NO: 560 - DNA, 331 bp, Artificial Sequence
  Synthetic
cagtctgccctgactcagcctgcctccgtgtctgggtctcctggacagtcgatcaccatctcctgttctggaaccagcagtgacgttggcgctcataactatgtctcctggtatcagcaatatccaggcaaagcccccaaactcatgatttttgatgtcactgatcgtccctcaggggtttccaatcgcttctctggttccaagtctggcaacacggcctccctgaccatctctgggctccaggctgaggacgaggctgattattactgcacttcatatacaaccaacaggtcctgggtgttcggcggcgggaccaaggtgaccgtcctag

SEQ ID NO: 561 - DNA, 355 bp, Artificial Sequence
  Synthetic
caggtgcagctggtgcagtctggggctgaggtgaagaagcctgggtcctcggtgaaggcctcctgcaaggcttctggaggcacgttcagcacctatactatcagctgggtgcgacaggcccctggacacgggcttgagtggatgggacggatcattcctatatttggtacaacaaagtacgcacagaagttccagggcagagtcacgattaccgcggacgaatccacgaccacagcctacctggagctgagcagcctgagatctgaggacacggccgtgtattactgtacgatcaacactcagtgggacctagtcccaaggtggggccagggaaccctggtcaccgtctcctcag

SEQ ID NO: 562 - DNA, 325 bp, Artificial Sequence
  Synthetic
gaaattgtgttgacgcagtctccaggcaccctgtctttgtctccaggggaaagagccaccctctcctgcagggccagtcagagtgttagcagcagctacttagcctggtaccagcagaaacctggccaggctcccaggctcctcatctatggtgcatccagcagggccactggcatcccagacaggttcagtggcagtgggtctgggacagacttcactctcaccatcagcagactggagcctgaagattttgcagtgtattactgtcagcagtatggtagctcactttacacttttggccaggggaccaagctggagatcaaac

SEQ ID NO: 563 - DNA, 364 bp, Artificial Sequence
  Synthetic
gaggtgcagctggtggagtctgggggaggcttggtaaagcctggggggtcccttagactctcctgtgcagtctctggattcactttcagtaacgtctggatgagctgggtccgccaggctccagggaaggggctggagtgggttggccgtattaaaagcaaaactgatggtgggacaacagactacgctgcacccgtgaaaggcagattcaccatctcaagagatgattcaaaaaacacgctgtatctgcaaatgaacagcctgaaaaccgaggacacagccgtgtattactgtacctcacagctatggttacggggccccggtgactactggggccagggaaccctggtcaccgtctcctcag

SEQ ID NO: 564 - DNA, 334 bp, Artificial Sequence
  Synthetic
aattttatgctgactcagccccactctgtgtcggagtctccggggaagacggtaaccatctcctgcaccggcagcagtggcagcattgccagcaactatgtgcagtggtaccagcagcgcccgggcagtgcccccaccactgtgatctatgaggataaccaaagaccctctggggtccctgatcggttctctggctccatcgacagctcctccaactctgcctccctcaccatctctggactgaagactgaggacgaggctgactactactgtcagtcttatgatagcagccttaattgggtgttcggcggagggaccaagctgaccgtcctag

SEQ ID NO: 565 - DNA, 364 bp, Artificial Sequence
  Synthetic
gaggtgcagctggtggagtctgggggaggcttggtgaagcctggggggtcccttaaagtctcctgtacagcctctggattcactttcactgacgcctggatgagctgggtccgccaggctccagggaaggggctggagtgggttggccgtattaaaagcagagcttatggtgggacgacagactacggtgcacccgtgcaaggcagattcaccatctcaagagatgattcaataaacactctttatctgcaaatgaacagcctgacagccgaggacacagccgtttattactgtacctcacaactatggttacggggccccggtgactactggggccagggaaccctggtcaccgtctcctcag

SEQ ID NO: 566 - DNA, 334 bp, Artificial Sequence
  Synthetic
aattttatgctgactcagccccactctgtgtcggagtctccggggaagacggtaaccatctcctgcaccggcagcagtggcagcattgccagcaactatgtgcactggtaccagcagcgcccgggcggtgcccccacgactgtgatctatgaggataaccaaagaccctctggggtccctgatcggttctctggctccatcgacatctcctccaactctgcctccctcaccatctctggactgaagactgaggacgagggtgactactactgtcagtcttatgatagtggtgttaattgggtgttcggcggagggaccaagctgaccgtcctag

SEQ ID NO: 567 - DNA, 391 bp, Artificial Sequence
  Synthetic
gaggtgcagctggtgcagtctggagcagaggtgaaaaagcccggggagtctctgaagatctcctgtaagggttctggttactactttaccagacagtggatcggctgggtgcgccagatgcccgggaaaggcctggagtggatggggatcatctatcctggtgactctgataccagatacagtccgtccttccaaggccaggtcaccatctcagccgacaagtccatcagcaccgcctatttgcagtggagcagcctgaaggcctcggacaccgccatgtattactgtgcgagggggggttgggaccccgccgagtatagcagttccgggggcgggggtctcgatgcttttgatatctggggccaagggacaatggtcaccgtctcttcag

SEQ ID NO: 568 - DNA, 322 bp, Artificial Sequence
  Synthetic
gaaattgtgttgacacagtctccagccaccctgtctttgtctccaggagaaagagccaccctctcctgcagggccagtcagagtgttagcagctacttagcctggtaccaacagagacctggccgggctcccaggctcctcatctatgatgcatccaacagggccactggcatcccaggcaggttcagtggcagtgggtctgggacagacttctctctcaccatcagcagcctagagcctgaagattttgcagtttattactgtcagcagcgtagcagctggcccctcaccttcggccaagggacacgactggagattaaac

SEQ ID NO: 569 - DNA, 381 bp, Artificial Sequence
  Synthetic
gaggtgcagctggtgcagtccggagcagaggtgaaaaagcccggggagtctctgaggatctcctgtaagggttctggatacagctttaccggctactggatcagctgggtgcgccagatgcccgggaaaggcctggagtggatggggagaattgatcccagtgactcttataccaactacagcccgtccttcgaaggccacgtcaccttctcagctgacacggccctcagcaccgcctacctgcagtggagcagcctgcaggcctcggacaccgccatatatttctgtgggagaattgcacctcctggaagggggagttattaccccacccaaaactacatggacgtctggggcaaagggaccacggtcaccgtctcctca

SEQ ID NO: 570 - DNA, 325 bp, Artificial Sequence
  Synthetic
gaaattgtgttgacgcagtctccaggcaccctgtctttgtctccaggggaaagagccaccctctcctgcacggccgatcagagtgttcccaatagttacttagcctggtaccaacacaaacctggccaggctcccaggctcctcatctatggtgcatccagcagggccactggcatcccagacaggttcagtggcagtgggtctggcatagacttcactctcaccatcagcagactggagcctgaagattttgcagtgtattactgtcagcagtatggtagcttacttctcactttcggcggagggaccaaggtggaaatcaaac

SEQ ID NO: 571 - DNA, 390 bp, Artificial Sequence
  Synthetic
caggtgcagctggtgcagtctggggctgaggtgaagaagcctgggtcctcggtgaaggtctcctgcaaggcttctggaggcaccttcaccagctatgctttcagctgggtgcgacaggcccctggacaagggcttgagtggatgggagggattatccctatctttggtacaacaaactacgcacagaagttccagggcagagtcacgattaccgcggacgaatccacgagcactgcctacatggagctgagcagcctgagatctgaggacacggccgtgtattactgtgcgagaccggagggatgtggtagtagaaccagctgcacaccgggggcttattattacggtatggacgtctggggccaagggaccacggtcaccgtctcctca

SEQ ID NO: 572 - DNA, 328 bp, Artificial Sequence
  Synthetic
gaaattgtgttgacacagtctccagccaccctgtctttgtctccaggggaaagggccaccctctcctgcagggccagtcagagtgttggcagctacttagcctggtaccaacagaaacctggccaggctcccaggctcctcatctatgatgcatccaacagggccactggcatcccagccaggttcagtggcagtgggtctgggacagacttcactctcaccatcagcagcctagagcctgaagattttgcattttatttctgtcagcagcgtaacagctggcctccggagtactcttttggccaggggaccaagctggagatcaaac

SEQ ID NO: 573 - DNA, 382 bp, Artificial Sequence
  Synthetic
caggtgcagctggtggagtctgggggaggcgtggtccagcctgggaggtccctgaaactctcctgtgcagcctctggattcaccttcaaaacttatggcatgcactgggtccgccaggctccaggcaaggggctggaatgggtggcagttatatcatatgatggaactaatgactactatgcagactccgtgaagggccgattcaccgtctccagagacaactccaagaacacgctgtatctgcaaatgaacagcccgagaactgaagacacggctgtgtattactgtgcgaaagcggggggcccatattactatgatactagcggttctttctggtactttgactactggggccagggaaccctggtcaccgtctcctcag

SEQ ID NO: 574 - DNA, 310 bp, Artificial Sequence
  Synthetic
gacatccagatgacccagtctccatcctccctgtctgcatctgtaggagacagagtcaccatcacttgccgggcaagtcagaccattagtagctatttaaattggtatcaacaaaaatcagggaaagcccctgagctcctggtctatgatgcatccaacttggaaagtggggtcccatcaaggttcagtggcagtggatctgggacagatttcactctcaccatcagcagtctgcaacctgaagattttgcaacttactactgtcaacagagttacagtttcggccctgggaccaaagtggatatcaaac

SEQ ID NO: 575 - DNA, 382 bp, Artificial Sequence
  Synthetic
caggtgcagctggtggagtctgggggaggcgtggtccagcctgggaggtccctgagactttcctgtgcagcctctggattcatcttcagtcactatggcatgcactgggtccgccaggctccaggcaaggggctggaatgggtggcagttatattatatgatggaagcgaccaatactatgcagactccgtgaagggccgattcaccatctccagagacaactccaagaacacgctgtttctggaaatgaacagcctgagacttgaggacacggctgtgtattactgtgcgaaaggggggggccaatattgtagtcatggtaattgctaccttaactactttgactactggggccagggagccctggtcaccgtctcctcag

SEQ ID NO: 576 - DNA, 322 bp, Artificial Sequence
  Synthetic
gacatccagatgacccagtctccatcctccctgtctgcatctgtaggagacagagtcacgatcacttgccaggcgagtcaggacattagagataatttaaattggtatcagcagaaaccagggaaagcccctcagctcctgatctacgatgcatccaatttgcaaccaggggtcccatcaaggttcagtggaagtggatctgggacacattttactttcaccatcagcagactgcagcctgaagatattgcaacatatttctgtcaacagtatgctaatctccctaccactttcggccctgggaccaaagtggatatcaaac

SEQ ID NO: 577 - DNA, 382 bp, Artificial Sequence
  Synthetic
caggtgcagctggtgcagtctggggctgaggtgaagaagcctgggtcctcggtgaaggtctcctgcaaggcttctggaggccccttcagcagctatgccttcacctgggtgcgacaggcccctggacaagggcttgagtggatgggagggatcatcgctacctttggtacagtaaactacgcacagaagttccagggcagagtcacgattaccgcggacgaattcacgagtacagtcaacatggagctgagcagcctgagatctgacgacacggccgtgtattactgtgcgcggagggattgtagtactacgagctgttatgatgaggtgctttatcggctagttgactggggtcagggaaccctggtcaccgtctcctcag

SEQ ID NO: 578 - DNA, 325 bp, Artificial Sequence
  Synthetic
gaaattgtgttgacgcagtctccaggcaccctgtctttgtctccaggggaaagagccaccctctcttgcagggccagtcagagtgttaacagcgattacttagcctggtataagcagaaacctggccaggctcccaggctcctcatctatggtacatccagcagggccactggcatcccagacaggttcagtggcagtgggtctgggacagacttcactctcaccatcagcagactggagcctgatgattttgcagtgtattactgtcaacagtatggtaactcacctcggacgttcggccaagggaccaaggtggaaatcaaac

SEQ ID NO: 579 - DNA, 388 bp, Artificial Sequence
  Synthetic
gaggtgcagctggtggagtccgggggaggcttggtaaagcctggggggtcccttagactctcctgtgcagcctctggattcactttcagtaacgcctggatgagctgggtccgccaggccccagggaaggggctggagtgggttggccgtattaaaagcaaaactgatgctgagacgacagactacgctgcacccgtgagaggcagattcaccatctcaagagataattcaaaaaatacactatatttggaaatgaacagcctgaaaaccgaggacacagccgtgtattattgtaccacagatgccgattactctgatagtagtggttattacgtgacctactactttgaatactggggccagggatccctggtcaccgtctcctcag

SEQ ID NO: 580 - DNA, 334 bp, Artificial Sequence
  Synthetic
cagtctgccctgactcagcctcgctcagtgtccgggtctcctggacagtcagtcaccatctcctgcactggaagcaacagtgatgttggtggttataactatgtctcctggtaccaacaacaccccggcaaagcccccaaactcgtgatttatgatgttagtttgcgaccctctggggtccctgatcgcttctctggttccaagtctggcatcacggcctccctgaccatctctgggctccagcctgaggatgaggctcattattactgctgctcatttgcaggcacctacactccctgggtgttcggcggagggaccaggctgaccgtcctag

SEQ ID NO: 581 - DNA, 349 bp, Artificial Sequence
  Synthetic
caggtgcagctgcaggagtcgggcccgggactggtgaagccatcggggaccctgtcgctcacctgcactgtctctggtggctccatcaacagtagaaactggtggagttgggtccgccagcccccagggaagggtctggagtggattggggaaatctttcatagtgggagcaccaactacaacccgtccctcgagagtcgagtcgccatatccatagacaagtcccacaaccacttctccctgaagctgacctctgtgaccgccgcggacacggccgtgtattattgtgcgagggctaatggtatacttgacttctggggccagggaaccctggtcaccgtctcctcag

SEQ ID NO: 582 - DNA, 320 bp, Artificial Sequence
  Synthetic
gacatccagatgacccagtctccatcctccctgtctgcatctgtaggagacagagtcaccatcacttgccgggcgagtcagggcattagtaattctttagcctggtatcagctgaaaccagggaaagcccctaagctcctgctctatgctgcatccacattggaaagtggggtcccatccaggttcagtggcagtggatctgggacgaatttcactctcaccatcagcagcctgcagcctgaagattttgcatcctattgctgtcaacattattatagcagccctcggacgttcggccaagggaccaaggtggaaatcaa

SEQ ID NO: 583 - DNA, 381 bp, Artificial Sequence
  Synthetic
caggtgcagctggtggagtctgggggaggcgtggtccagcctgggaggtccctgagaattgcctgtggagcctctggattcacgttcagtacttatgacatgcactgggtccgccaggctccagtcaaggggctggagtgggtggcagttatatcacgtgatggaagtggtaaattctatgcagactccgtgaagggccgattcaccatctccagagacaattccaagaagacgctgtatctgcaaatggacagtctgagacctgaggacacggctatgtattattgtgcgagagattttgagagtagaacctgggacccccccaaatactattacgctttggacgtctggggccaagggaccacggtcaccgtctcctca

SEQ ID NO: 584 - DNA, 325 bp, Artificial Sequence
  Synthetic
gacatccagatgacccagtctccatcctccctgtctgcatctgtaggagacagagtcaccatcacttgccgggcaagtcagagcattagcacctatttaaattggtatcagcagaaaccagggaaagcccctagcctcctcatctatgctgcatccagtttatatagtggggtcccatcaaggttcagtggcagtggatctgggacagatttcagtctcaccatcagcagtctgcaacctgaagattttgcaacttactactgtcaacagacttacactacccccacgtggacgttcggccaagggaccaaggtggaaatcaaac

SEQ ID NO: 585 - DNA, 382 bp, Artificial Sequence
  Synthetic
gaggtgcagctggtgcagtccggagcagaggtgaaaaagcccggggagtctctgaggatctcctgcaagggctctggatacagctttcacacctactggatccactgggtgcgccagatgcccgggaaaggcctggagtggatggggaagattgatcctagtgactcttataccaactacagcccatccttccaaggccacgtcaccttctcagctgacaggtccatcagcactgcctacttgcagtggagcagcctgaaggcctcggacaccgccacatactattgtgcgagactttcctggagtccccccaccagaaccaccgacgaaaaaaactggttcgacccctggggccagggaaccctggtcaccgtctcctcag

SEQ ID NO: 586 - DNA, 322 bp, Artificial Sequence
  Synthetic
gacatccagttgacccagtctccatccttcctggctgcatctgcaggagacagagtcaccatcacttgccgggccagtcagggcattagcagttatttagcctggtatcagcaaaaaccggggaaagcccctaaggtcctgatctatgctgcatccactttgcaaagtggggtcccatcaaggttcagcggcagtggatctgggacagaattcactctcacaatcagcagcctgcagcctgaagattgtgcaacttattactgtcaacagtttaatagtgaccctctcactttcggcggagggaccaaggtggagatcaaac

SEQ ID NO: 587 - DNA, 358 bp, Artificial Sequence
  Synthetic
gaggtgcagctggtgcagtctggagcagaggtgaaaaagcccggggaatctctgacgatctcctgtaaggattctggaaacagttttaccatctactggatcggctgggtgcgccagatgcccgggaaaggcctggagtggatggggatgatctatcctggtgactctggtaccagatacagcccgtccttcgaaggccaagtcaccatctcagccgacgagtccatcaacaccgcctacctgcagtggcgcagcctgaaggcctcggacaccgccatgtattactgtgtgagaggtatagcagtggactggtacttcgatctctggggccgtggcaccctggtcaccgtctcctcag

SEQ ID NO: 588 - DNA, 335 bp, Artificial Sequence
  Synthetic
cagtctgtgctgactcagccgccctcagtgtctggggccccagggcagagggtcaccatctcctgcactgggagcagctccaacatcggggcaggttttgatgttcactggtaccagcagcttccaggaacagcccccaaactcctcatctatggtaacaacaatcggccctcaggggtccctgaccgattctctggctccaagtctgccacctcagcctccctggccatcactgggctccaggctgaggatgaggctgattattactgccagtcctctgacagcagcctgagtggcctttatgtcttcggaactgggaccaacgtaatcgtcct

SEQ ID NO: 589 - DNA, 381 bp, Artificial Sequence
  Synthetic
caggtgcagctggtgcagtctggggctgaggtgaagaagcctgggtcctcggtgaaggtctcctgcaaggcttctggaggcaccttcagcagctatgctatcagctgggtgcgacaggcccctggacaagggcttgagtggatgggaaggatcatccctatccttggtatagcaaactacgcacagaagttccagggcagagtcacgattaccgcggacaaatccacgagcacagcctacatggagctgagcagcctgagatctgaggacacggccgtgtattactgtgcgagagattccgagtatagcagcagctggtactcacggggctactacggtatggacgtctggggccaagggaccacggtcaccgtctcctca

SEQ ID NO: 590 - DNA, 337 bp, Artificial Sequence
  Synthetic
gatattgtgatgactcagtctccactctccctgcccgtcacccctggagagccggcctccatctcctgcaggtctagtcagagcctcctgcatagtaatggatacaactatttggattggtacctgcagaagccagggcagtctccacagctcctgatctatttgggttctaatcgggcctccggggtccctgacaggttcagtggcagtggatcaggcacagattttacactgaaaatcagcagagtggaggctgaggatgttggggtttattactgcatgcaagctctacaaactcctcccactttcggcggagggaccaaggtggaaatcaaac

SEQ ID NO: 591 - DNA, 381 bp, Artificial Sequence
  Synthetic
caggtgcagctggtgcagtctggggctgaggtgaagaagcctgggtcctcggtgaaggtctcctgcaaggcttctggggacacgttcaccaattatgctttcagctggatgcgacaggcccctggacaagggcttgagtggatgggaaggatcatccctattcttggaatagtaaagtattcacagaagttccaggacagggtcaggattagtgcggacaaatccacgagcacagcctacatggacctgagcagcctgagatctgaggacacggccatgtattactgtgcgagagattccgaattcagtaccagctggttctcacggggctaccacggtatggacgtctggggccaagggaccacggtcaccgtctcctca

SEQ ID NO: 592 - DNA, 337 bp, Artificial Sequence
  Synthetic
gatattgtgatgactcagtctccactctccctgcccgtcacccctggagagccggcctccatctcctgcaggtctagtcagagcctcctgcatggtgatggatacaactatttggattggtacctgcagaagccagggcagtctccacacctcctgatctatttgggttctaatcggacctccggggtctctgacaggttcagtggcagtggatcaggcacagattttacactgaaaatcagcagagtggaggctgaggatgttggggtctattactgcatgcaagctctacaaactcctcccactttcggcggagggaccaaggtggaaatcaaac

SEQ ID NO: 593 - DNA, 382 bp, Artificial Sequence
  Synthetic
caggtgcagctacagcagtggggcgcaggactgttgaagccttcggagaccctgtccctcacctgcgctgtctatggtgggaccttcagtggttactcctggacctggatccgccagcccccagggaaggggctggattggattggggaaatcaatcatagtggaagcaccaattataacccgtccctcaagagtcgagtcaccatatccgtagacacgtccaagaatcagttctccctgaagctgagctctgtgaccgccgcggacacggctgtgtattactgtgcgagagctggttttggattcgttatcacttctcgttcaggaacggatcccctttttgactactggggccagggaaccctggtcaccgtctcctcag

SEQ ID NO: 594 - DNA, 337 bp, Artificial Sequence
  Synthetic
cagtctgtgctgactcagccgccctcagtgtctggggccccagggcagagggtcaccatctcctgcactgggagcagctccaacatcggggcaggttatgatgttcactggtaccagcagcttccaggaacagcccccaaagtcctcatctatggtaacaacaatcggccctcaggggtccctgaccgattctctggctccaagtctggcacctcagcctccctggccatcactgggctccaggctgaggatgaggctgattattactgccagtcctatgacaccagcctgagtggttcgagggtgttcggcggagggaccaagctgaccgtcctag

SEQ ID NO: 595 - DNA, 361 bp, Artificial Sequence
  Synthetic
gaggtgcagctggtggagtctgggggaggcttggtacagccagggcggtccctgagactctcctgtacaggttctgaattcacctttggtgatttttctatgagctggttccgccaggctccagggaaggggctggagtgggtaggtttcattagaaggaaagctgatggtgggacaacagaatacgccgcgtctgtgagaggcagattcaccatctcaagagatgattccaaaagcatcgcctatcttgtaatgaacagcctgaaaagcgaggacacagccgtgtattactgtactagagcgtggatcccgacgccccatgactactggggccagggagtgctggtcaccgtctcctcag

SEQ ID NO: 596 - DNA, 329 bp, Artificial Sequence
  Synthetic
cagtctgtgctgacgcagccaccctcagcgtctgggacccccgggcagagggtcaccatctcttgttctggaagcagctccaacatcggaagtaatcctgtaaactggtaccagcagctcccaggaacggcccccaaactcctcatctatagtaataatcggcggccctcaggggtccctgaccgattctctggctccaagtctggcgcctcagcctccctggccataagtgggctccagtctgaggatgaggctgcttattactgtgcagcatgggatgacagccggaaaggtcccgtgttcggcggagggaccaagctgaccgtcct

SEQ ID NO: 597 - DNA, 361 bp, Artificial Sequence
  Synthetic
gaggtgcagctggtggagtctgggggcggcttggtacagccagggcggtccctgagactctcctgtacagcttctggattcacctttgctgatttttctatgacctggttccgccaggctccaggaaaggggctggagtgggtaggtttcattagaagagaagctgatggtgggacaacagaatacgccgcatctgtgagaggcagattcaccatctcaagagatgattccaaaggcatcgcctatcttctaatgaacagcctgaagagcgaggacacagccatgtactactgttctagagcgtggatcccgacgccccatgactactggggccagggaacgctggtcaccgtctcctcag

SEQ ID NO: 598 - DNA, 329 bp, Artificial Sequence
  Synthetic
cagtctgtgctgacgcagccaccctcagcgtctgggacccccgggcagagggtcaccatctcttgttctggaggcagctccaacatcggaagtaatcctgtaaactggtaccagcagctcccaggaacggcccccaaactcctcatctatagtaataatcagcggccctcaggggtccctgaccgattctctggctccaagtctggcgcctcagcctccctggccatcagtgggctccagtctgaggatgaggctgattattactgtgcagcttgggatgacagcctgaagggtcccgtgttcggcggagggaccaaggtgaccgtcct

SEQ ID NO: 599 - DNA, 355 bp, Artificial Sequence
  Synthetic
gaggtgcagctggtgcagtctggagcagaggtgaaaaagccgggggattctctgaagatctcctgtaaggggtccggatacagttttattagtcactggatcgcctgggtgcgccagaagcccgggaaaggcctagagtggatggggatcatccacccgggcgactctgataccagatacagcccgtccatccaaggccaggtcaccatctcagccgacagattcatcaccaccgcctacctgcagtggagcagcctgcaggcctcggacactgccatgtattactgtgcgagacggggcagcagctgggaaattgatcactggggccagggaaccctggtcaccgtctcctcag

SEQ ID NO: 600 - DNA, 330 bp, Artificial Sequence
  Synthetic
cagtctgtgctgacgcagccaccctcagcgtctgggacccccgggcagagggtcaccatctcttgttctggaagcagctccaacatcggaagttatactgtgaactggtaccaccaggtcccaggaacggcccccaaagtcctcatctatggtaatactcagcggccctcaggggtccctgaccgattctctggctccaagtctggcacctcagcctccctggccatcagtgggctccagtctgaggatgagggtgattattactgtgcagcatgggatgacagtctggatggttggatgttcggcggggggaccacgctgaccgtccta

SEQ ID NO: 601 - DNA, 364 bp, Artificial Sequence
  Synthetic
caggtgcagctgcaggagtcgggcccaggactggtgaagccttcggagaccctgtccctcaattgcaatgtctctggtggctccatcagcaattactactggagctggattcggcagcccccagggaagggactggagtggattggctttatctcttacagtgggagcaccgactacaacccctccctcaagagtcgagtcatcatatcaatagacacgtccaagaagcacttctccctgaacctgagctctgtgaccgccgcagacacggccgtgtatttctgtgcaagacattacgatattttgactgccctgagttggttcgacccctggggccagggaaccctggtcaccgtctcctcag

SEQ ID NO: 602 - DNA, 330 bp, Artificial Sequence
  Synthetic
cagtctgtgctgactcagccgccctcagtgtctgcggccccaggacagacggtcaccatctcctgctctggaagcagctccaacattcggaataattttgtatcctggtatcagcagttcccagggacagcccccaaactcctcatttatgacaataataagcgcccctcagggattcctgaccgattctctggctccaagtctggcacgtcagccaccctgggcatcaccggactccagactggggacgaggccgattattactgcggaacatgggatagcagcccgagtgcctgttgggtgttcggcgcagggaccaaactgaccgtc

SEQ ID NO: 603 - DNA, 373 bp, Artificial Sequence
  Synthetic
caggtgcagctggtggagtctgggggaggcgtggtccagcctgggaggtccctgacactctcctgcacagcctctggattcaccttcaatagatttgcaatgttctgggtccgccaggctccaggcaaggggctggaatgggtggcagttatatcatttgatggaagttatgaacactatgcagagtccgtgaagggccgattcgccatcttcagagacaaccccaagaacacactgtatctacagatgaacagcctgagagccgaggacacggctgtctactactgtgcgaaaagcccgataaattactgcgctaatggtgtgtgctatcctgactcctggggccagggaaccctggtcaccgtctcctcag

SEQ ID NO: 604 - DNA, 333 bp, Artificial Sequence
  Synthetic
aattttatgctgactcagccccactctgtgtcggagtctccggggaagacggttaccatctcctgcaccggcagcagtggcagcattgccaacaactatgtgcagtggtaccagcagcgcccgggcagtgcccccaccactgtgatctttgaagatacccaaagaccctctggggtccctgatcgattctctggctccatcgacagctcctccaattctgcctccctcaatatctctggactgaagcctgaggacgaggctgactattactgtcagtcttttgatgtcaacagtcgttgggtgttcggcggagggaccaagctgaccgtccta

SEQ ID NO: 605 - DNA, 353 bp, Artificial Sequence
  Synthetic
gaggtgcagctggtggagtctgggggaggcttggtccagccgggggggtccctgagactctcctgtgcagcctctggaatcatcgtcagtaacaactacatgagctgggtccgccaggctccagggaagggcctggaatgggtctcaactatttttagcggtgggagcacatactacgcagactccgtgaaggacagattcaccatctccagagacaattccaataacacactgtatcttcaaatgaacagcctgagacccgaggacacggccgtgtattactgtacgagattggggggctaccgatacggcatggacgtctggggccaagggaccacggtcaccgtctcctc

SEQ ID NO: 606 - DNA, 322 bp, Artificial Sequence
  Synthetic
gacatccagatgacccagtctccatcctccctgtctgcatctgtaggagacagagtcaccatcacttgccaggcgagtcaggacattagcaaatatttaaattggtatcaacagaaaccagggacagcccctaaactcctgatctacgatgcatccgaattggaaagaggggtcccatcaagattcagtggaagtggatctgggacagattttactttcaccatcatcagcctgcagcctgaagatattgcaacatattactgtctacagtatgataatctcccgtacacttttggccaggggaccaagctggagatcaaac

SEQ ID NO: 607 - DNA, 350 bp, Artificial Sequence
  Synthetic
gaggtgcagctggtggagtctgggggaggcttggtccagccgggggggtccctgagactctcctgtacagcctctagattgaccgtcagtagcaactacatgaactgggtccgccaggctccagggaaggggctggagtgggtctcagttatttatgccggtggtagcacattctacgcagactccgtgaaggacagattcaccatctccagagacaattccatgaacacgctatatcttcaaatgaacagcctgagagtcgaggacacggctgtgtactactgtgcgagactggggggctaccgatacggaatggacgtctggggccaggggaccacggtcaccgtctc

SEQ ID NO: 608 - DNA, 320 bp, Artificial Sequence
  Synthetic
gacatccagatgacccagtctccatcttccctgtctgcatctgtaggagacagagtcaccatcacttgccaggcgagtcaggacattagcaactatttaaattggtatcaacagtcaccagggaaagcccctaagctcctgatctacgatgcgtcgaaattggaaacaggggtcccatcaaggttcagtggaagtggatctggaacagattttactttcaccatcagcagcctgcagcctgaagatattgcaacatattactgtctacagtatgataatctcccgtacagttttggccaggggaccaagctggagatcaa

SEQ ID NO: 609 - DNA, 373 bp, Artificial Sequence
  Synthetic
caggtgcagctggtgcagtctggggctgaggtgaagaagcctgggtcctcggtgagggtctcttgcaaggcttctggaggcaccttcagcagttttactatcacctgggtgcgacaggcccctggacaagggcttgagtggatgggaaggatcatccctaatcttaatatacccaattacgcacagagattccagggcagaatcacaattaccgcggagaaatccacgagcacagcctacctggagctgagcagcctgagatctgaggacacggccgtatattattgtgcgagaggggtcggatatagtggaagcgggtcaaactggtacttcgatctctggggccgtggcaccctggtcaccgtctcctcag

SEQ ID NO: 610 - DNA, 332 bp, Artificial Sequence
  Synthetic
cagtctgtgctgacgcagccgccctcagtgtctggggccccagggcagagggtcaccatctcctgcactgggagcagctccaacatcggggcaggttatgatgtacactggtaccagcaacttccaggaacagcccccaaactcctcatctctggtcacatcaatcggccctcaggggtccctgaccgattctctggctccacgtctggcacctcagcctccctggccatcactgggctccaggctgaggatgaggctgattattactgccagtcttatgacagcagcctgagtgattcggtgttcggcggagggaccaagctgaccgtcct

SEQ ID NO: 611 - DNA, 370 bp, Artificial Sequence
  Synthetic
gaagtgcagctggtggagtctgggggaggcttggtacagcctggcaggtccctgagactctcctgtgcagcctctggattcacctttgatgattatggcatgcactgggtccgtcaagctccagggaagggcctggagtgggtctcaggtattagttggaacagtggtagtatagcctatgcggaatttgtgaagggccgattcaccatctccagagacaacgccaagaactccctgtatctgcaaatgaacagtctgagaactgaggacacggccttgtattactgtgcaaaagcggttcctaccagctgctatgtgttttgtgctcttgatatttggggccaagggacaatggtcaccgtctcttcag

SEQ ID NO: 612 - DNA, 325 bp, Artificial Sequence
  Synthetic
gacatccagatgacccagtctccatcctccctgtctgcatctgtaggagacagagtcaccatcacttgccgggcgagtcagggcattagcaattatttagcctggtatcagcagagcccagggaaagttcctaagctcctgatctatgctgcatccactttgcaatcaggggtcccatctcggttcagtggcagtggatctgggacagatttcactctcaccatcagcagcctgcagcctgaagatgttgcaacttattactgtcaaaagtataacagtggccctgcgctcactttcggcggagggaccaaggtggaaatcaaac

SEQ ID NO: 613 - DNA, 376 bp, Artificial Sequence
  Synthetic
gaggtgcagctggtggagtctgggggaggcttggtaaagccagggcggtccctgagactctcctgttcagcttctggattcacctttggtgattatgctatgacctggttccgccaggctccagggaaggggctgcagtgggttggtttcattagaagcaaaccttttggtgggacaacacaatacgccgcgtctgtgaaaggcagattcaccatctcaagagatgattccaacaacgtcgcctatctgcaaatgaacagccttaaaaccgaggacacaggcgtgtattattgtactagattaagacaggttcagggagtccccgggtactactttgaccagtggggccagggagccctggtcaccgtctcctcag

SEQ ID NO: 614 - DNA, 319 bp, Artificial Sequence
  Synthetic
gaaatagtgatgacgcagtctccagccaccctgtctgtgtctccaggggaaagagccaccctctcctgcagggccagtcagagtgttagcagcaacttagcctggtaccagcagaaacctgggcaggctcccaggctcctcatctatggtgcatccatcagggctactggtatcccagccaggttcagtggcagtgggtctgggacagagttcactctcaccatcagcagcctgcagtctgaagattttgttgtttattactgtcaggagtatgataactggttcgctttcggcggagggaccaaggtggaaatcaaac

SEQ ID NO: 615 - DNA, 358 bp, Artificial Sequence
  Synthetic
gaggtgcagctggtggagtctgggggaggcttgatacagcctggggggtctctgagactctcctgtgcagcctctggattcaccttcagtagctacgacatgcactgggtccgccaagttacaggaaaaggtctggagtgggtctcagctattggtactgctggagacagatactatctagactccgtgaagggccgattcaccatctccagagaaaatgccaagaactccctgcatcttcagatgaacaacctgagagtcggagacacggctgtgtattactgtgcaagagcctctggagtccttactacacactttgactcctggggccggggaaccctggtcaccgtctcctcag

SEQ ID NO: 616 - DNA, 325 bp, Artificial Sequence
  Synthetic
gacatccagatgacccagtctccatcctccctgtctgcatctgtaggagacagagtcaccatcacttgccgggcaagtcagagcattggcagacatttaagttggcatcagcagaaactagggaaagcccctaagctcctcatttatagtgcatccagtttgcaaagtggggtcccatcaaggttcagtggcagtggatctgggacagatttcactctcaccatcagcagtctacaacctgaagattttgcaacttactactgtcaacagagttacgaaacccctccgtggacgttcggccaagggaccaaggtggagatcaaac

SEQ ID NO: 617 - DNA, 373 bp, Artificial Sequence
  Synthetic
caggtgcagctggtggagtctgggggaggcgtggtccagcctgggaggtccctgagactctcatgtgcagcgtctggattcaccttcagaatttatgccatgcactgggtccgccaggctccaggcaagggactggagtgggtggcaattatctggaatgatggaagtaaacaatattatgcagactccatgaagggccgattcaccatctccagagacaattccaagaacacactgtatctgcaaatgaacagcctgagagacgaggacacggctctgtattactgtgcgagagagggtgttgcattagccggcaacggcgtcgatggttttgatatctggggccaagggacaatggtcaccgtctcttcag

SEQ ID NO: 618 - DNA, 322 bp, Artificial Sequence
  Synthetic
gacatccagatgacccagtctccatcctccctgtctgcgtctgtaggggacagagtcaccatcacttgccgggcaagtcagaccattagcacctttttaaattggtatcgacaaataccaggaaaagcccctaaactcctgatctatgctgcatccagtttgcaaagtggggtcccctcaaggttcagtggcagtgggtctgggacagatttcactctcaccatcagcagtctccaacctgaagattttgcaacttactactgtcaacagacttacagtaccccgtacacttttggccgggggaccaagctggagatcaaac

SEQ ID NO: 619 - DNA, 376 bp, Artificial Sequence
  Synthetic
caggtgcagctggtggagtctgggggaggcgtggtccagcctgggagatccctgagactctcctgtgcagcgtctggattcaccttcagaatttatgccatgcactgggtccgccaggctccaggcaaggggctggagtgggtggcaattatatggaatgatggaaataaaaaggactatgtagactccgtgaagggccgattcaccatctccagagacaattccaggaacacagtgtatctgcaaatgaacagcctgagagtcgatgaggacacggctgtgtattattgtgcgagagagggtgtagcagtaggtggtaacggcgttgatggttttgatatgtggggccaagggacaatggtcaccgtctcttcag

SEQ ID NO: 620 - DNA, 322 bp, Artificial Sequence
  Synthetic
gacatccagatgacccagtctccatcctccctgtcttcatctgtaggggacagagtcaccatcacttgtcgggcaagtcagagcattggcatctatttaaattggtatcaacaaaaaccagggaaggtccctaacctactgatctatgctgcatccactttgcaaactggggccccatcaaggttcagtggcagtggatctgggacagatttcattctcagcatcagcagtctccaacctgaagattttgcaacttactactgtcaacagacttacagtgtcccgtacacttttggccaggggaccaagctggagatcaaac

SEQ ID NO: 621 - DNA, 364 bp, Artificial Sequence
  Synthetic
caggtgcagctgcaggagtcgggcccaggactggtgaagccttcggagaccctgtccctcacctgcactgtctctggtggctccatcagtagttactactggagctggatccggcagcccccagggaagggactggagtggattgggtatatctattacagtgggagcaccaactacaacccctccctcaagagtcgagtcaccatatcagtagacacgtccaagaaccagttctccctgaagctgagctctgtgaccgccgcagacacggccgtgtattactgtgcgagactattatccacggagtggttatttaactggttcgacccctggggccagggaaccctggtcaccgtctcctcag

SEQ ID NO: 622 - DNA, 322 bp, Artificial Sequence
  Synthetic
tcctatgagctgacacagccaccctcagtgtccgtgtccccaggacagacagccagcatcacctgctctggagataaattgggggataaatatgcttgctggtatcagcagaagccaggccagtcccctgtgctggtcatctatcaagatagcaagcggccctcagggatccctgagcgattctctggctccaactctgggaacacagccactctgaccatcagcgggacccaggctatggatgaggctgactattactgtcaggcgtgggacagcagcactgcttatgtcttcggaactgggaccaaggtcaccgtcctag

SEQ ID NO: 623 - DNA, 364 bp, Artificial Sequence
  Synthetic
caggtgcagctgcaggagtcgggcccaggactggtgaagccttcggagaccctgtccctcacctgcactgtctctggtgactccatcaataaatactactggggctggatccggcagcccccagggaagggactggagtggattgggtatatctactacagtgggaccaccaactacaacccctccctcaagagtcgagtcaccatatcagtagacacgtctaagacccagttctccctgaagctgagctctgtgaccgccgcagacacggccgtgtattactgtgcgagactattatctacggagtggtcatttaactggttcgacccctggggccagggaaccctggtcaccgtctcctcag

SEQ ID NO: 624 - DNA, 322 bp, Artificial Sequence
  Synthetic
tcctatgagctgactcagccaccctcagtgtccgtgtccccaggacagacagccagcatcacctgctctggagatacattgggggataaatatgcttgctggtatcagcagaagccaggccagtcccctctcctggtcatctatcaaaataacaagcggccctcagggatccctgagcgattctctggctccaactctgggaacacagccactctgaccatcagcgggacccaggctatggatgaggctgactattactgtcaggcgtgggacagcagcactgcttatgtcttcggaactgggaccaaggtcaccgtcctag

SEQ ID NO: 625 - DNA, 385 bp, Artificial Sequence
  Synthetic
gaggtgcagctggtggagtctgggggaggcttggtaaagcctggggggtcccttagactctcctgtgcagcctctggattcactttcaataacgcctggatgacctgggtccgccaggctccagggaaggggctggagtgggttggccgtattaaaagcaaaactgatggtgggacaacggactacggtacacccgcgaaaggcagattcaccatctcaagagatgactcaaaaaacacgttgtatctgcaaatgaaaagcctgagaaccgaggacacagccgtctattattgtactacagtagacgtacaaggaatttgggagctgctagagaatgatgcctttgatatctggggccaagggacaatggtcaccgtctcttcag

SEQ ID NO: 626 - DNA, 325 bp, Artificial Sequence
  Synthetic
gaaattgtgttgacgcagtctccaggcaccctgtctttgtctccaggggaaagagccaccctctcctgcagggccactcaggctattagcagcacctacttagcctggtaccagcagaaacctggccaggctcccaggctcctcatctatggtgcattcagcagggcccctggcatcccagacaggttcagtggcagtgggtctgagacagacttcactctcaccatcagcagactggagcctgaagattttgcagtgtattactgtcaacagtctgataggtcacctttcactttcggccctgggaccaaagtggatatcaaac

SEQ ID NO: 627 - DNA, 352 bp, Artificial Sequence
  Synthetic
gaggtgcagctggtggagtctgggggaggcttggtccagcctggggggtccctgagactctcctgtgcagcctctgaattcatcgtcagtagaaactacatgagctgggtccgccaggctccagggaaggggctggagtgggtctcacttatttatcccggtggtagcacatattatccagactccgtgaagggcagattcaccatctccagagacaattccaagaacacactgtatcttcaaatgaacagcctgagaggcgaggacacggctgtatattactgtgcgagagatttaggtgatagtcgccttgactactggggacagggagccctggtcaccgtctcctcag

SEQ ID NO: 628 - DNA, 328 bp, Artificial Sequence
  Synthetic
gacatccagttgacccagtctccatccttcctgtctgcatctgtaggagacagagtcaccatcacttgccgggccagtcagggcattagcagttatttagcctggtatcagcaagacccagggaaagcccctaaactcctgatctatgctgcgtccactttgcagagtggcgtcccatcaaggttcagcggcagtggatctgggacagaattcactctcacaatcagcagcctgcagcctgaagattttgcaacttattactgtcaacaacttgatagttaccctccagggtacagttttggccaggggaccaagctggagatcaaac

SEQ ID NO: 629 - DNA, 379 bp, Artificial Sequence
  Synthetic
gaggtgcagctggtggagtctgggggaggcttggaaaagccagggcggtccctgagactctcctgtataggttctggattcaccttcggtgattatgctatgggctggttccgccaggctccagggaaggggctggagtgggtaggtttcattagaagtaaagcttatggtggggcatcagaatacgccgcgtctgtgaaaggcagattcaccatctcaagagatgattccaaaagcatcgcctatctgcaaatgaacagcctgaaaaccgaggacacagccgtctatttttgtactagaagagcccattactctggttcaggacttagcagttatgttgactactggggccagggaaccctggtcaccgtctcctcag

SEQ ID NO: 630 - DNA, 327 bp, Artificial Sequence
  Synthetic
cagactgtggtgactcaggagccctcactgactgtgtccccaggagggacagtcactctcacctgtggctccagcactggaactgtcaccagtggtcagtatccctactggttccagcagaagcctggccaagcccccaagacactgatttatgatacaagcagcaaacactcctggacccctgcccggttttcaggctccctccttgggggcaaagctgccctgaccctttcgggtgcgcagcctgaggatgaggctgagtattactgcttgatctcctatagtggtgcttgggtgttcggcggagggaccaagctgaccgtccta

SEQ ID NO: 631 - DNA, 373 bp, Artificial Sequence
  Synthetic
gaggtgcagctggtggagtctgggggagacttgacacagccgggggggtccctgagactctcctgtgcagcctctggattcaccttcagcaactacgacatgcactgggtccgccaagctacaggaaaaggtctggagtgggtctcaggtattggtacttctggtgacacatactatgcagactccgtgaagggccgattcaccatctccagagaaaatgccaagaactccttgtttcttcaaatgaatcatctgagagccggggacacggctacgtattactgtgcaagaacggagtacgcttgggggagttatcgttcctactggtacttcgacctctggggccgaggcaccctggtcaccgtctcctcag

SEQ ID NO: 632 - DNA, 325 bp, Artificial Sequence
  Synthetic
gacatccagatgacccagtctccatcctccctgtctgcatctgtaggagacagagtcaccatcacttgccggacaagtcagaccattagcacctatttaaattggtatcagcagaaaccagggaaagcccctaaggtcctgatctttgctgcgtccagtttgcaaagtggggtcccatcaagattcagtggcagtggatctgggacagatttcactctcaccatcagcagtctgcaacctgaagattttgcaacttacttctgtcaacagagttacagtgcccctccgtggacgttcggcccagggaccaaggtggagatcaaac

SEQ ID NO: 633 - DNA, 373 bp, Artificial Sequence
  Synthetic
gaggtgcagctggtggagtctgggggagacttgacacagcctggggggtccctgagactctcctgtgcagcctctggattcaccttcagcagctacgacatgcactgggtccgccaagctacaggaaaaggtctggagtgggtctcaggtattggtacttctggtgacacatactatgcagactccgtgaagggccgattcaccatctccagagaaaatgccaagaactctttgtttcttcaaatgaataatctgagagccggggacacggctacgtattactgtgcaagaacggagtacgcttgggggagttatcgttcctactggtacttcgatctctggggccgaggcaccctggtcaccgtctcctcag

SEQ ID NO: 634 - DNA, 325 bp, Artificial Sequence
  Synthetic
gacatccagatgacccagtctccatcctccctgtctgcatctgtaggagacagagtcaccatcacttgccggacaagtcagaccattagcacctatttaaattggtatcagcagaaaccagggaaagcccctaaggtcctgatctatgctgcgtccagtttgcaaagtggggtcccatcaagattcagtggcagtggatctgggacagatttcactctcaccatcagcagtctgcaacctgaagattttgcaacttacttctgtcaacagagttacagtgcccctccgtggacgttcggcccagggaccaaggtggaaatcaaac

SEQ ID NO: 635 - DNA, 355 bp, Artificial Sequence
  Synthetic
gaggtgcagctggtggagtctgggggcgccttgatccagccggggggatccctgagactctcctgtgcagcctctgggttcaccgtcagtagcaacgacatgacctgggtccgccaggctccagggaaggggctggagtgggtctcagttatttataccggtggtggaacatatcacgcagactccgcgaagggacgattcatcatctctagacacaactccaagaacacgttgtctcttcaaatgaacgacctgagagctgaggacacggccgtgtattactgtgcgagactgactatgaccacatactactttgactcctggggccagggaaccctggtcaccgtctcctcag

SEQ ID NO: 636 - DNA, 331 bp, Artificial Sequence
  Synthetic
tcctatgagctgacacagccaccctcggtgtcactggccccaggacagacggccaggattacctgtgggggaaacggcattggaagtaaatctgtacactggtaccagcagaagccaggccgggcccctgtgctggtcgtctatgacgacagcgtccggccctcagggacccctgcgcgattttctggcgccaactctgggaacacggccaccctgaccatcagcagggtcgaagccggggatgaggccgactattactgtcaggtgtgggatagttttagagatcatcaagattgggtgttcggcggagggaccaagctgaccgtcctag

SEQ ID NO: 637 - DNA, 361 bp, Artificial Sequence
  Synthetic
gaggtgcagctggtggagtctgggggaggcttggtacagccgggggggtccctgagactctcctgtgcagcctctggattcaccttcagtaactacgacatgcactgggtccgccaagtcacaggaaaaggtctggagtgggtctcacttattggtactgctgctgacgcatactatgcagactccgtgaagggccgattcaccatctccagagaaaatgccaagaactccttataccttcaaataaacagcctgagagccggggacacggctgtgtatttctgtgcaagaggagatagcagtggcttatacactttttttgactactggggccagggaaccctggtcaccgtctcctcag

SEQ ID NO: 638 - DNA, 322 bp, Artificial Sequence
  Synthetic
gacatccagatgacccagtctccatcctccctgtctgcatctgtcggagacagagtcaccatcacttgccgggcaagtcagagcgttactaggtatttaaattggtatcagctgaaaccagggaaagcccctaagctcctgatctatgctgcatccagtttgcaaagtggggtcccatcaaggttcagtggcagtggatctgggacagatttcactctcaccatcagcagtctgcaacctgaagattttgcaacttattactgtcaacagagttacagtaccctcgggctcactttcggcggagggaccaaggtggagatca

SEQ ID NO: 639 - DNA, 373 bp, Artificial Sequence
  Synthetic
caggtgcagctggtgcagtctggggctgaggtgaagaagcctgggtcctcggtgaaggtctcctgcaaggcttctggagccaccttcagcaactatattatttcctgggtgcgacaggcccctggacaagggcttgagtggatgggaaggaccatccctctccttgatattgcaaactacgcacagaaattccagggcagagtcaccataaccgcggacaaatccacgcgcattgtctacatgcacctgggcagtctgacatctgaggacacggccgtctattactgtgcgacaggaaaggggtatagcagctcttccgcggcttactactttgaccactggggccagggaaccctggtcaccgtctcctcag

SEQ ID NO: 640 - DNA, 337 bp, Artificial Sequence
  Synthetic
cagtctgtgctgacgcagccgccctcagtgtctggggccccagggcagagggtcaccatttcctgcactggtaccaactccaacatcggggcaggttatgatatacactggtaccagcagcttccaggaacggcccccaaactcctcatctatggtagcaataatcggccctcaggggtccctgaccgattctctggctccaagtctggcacctcagcctccctggccatcactgggctccaggctgaggatgaagctgattattactgccagtcctatgacagcagcctgagtggatcggaggtgttcggcggcgggaccaagttgaccgtcctag

SEQ ID NO: 641 - DNA, 366 bp, Artificial Sequence
  Synthetic
caggtgcagctggtggagtctgggggaggcgtggtccagcctgggaggtccctaagactctcctgtgtagcctctggattcaccttcagtaactacggcatgcactgggtccgccaggctccaggcaaggggctggagtgggtggcagttatattatatgatggaagtgataaatactatttagactccgtgaagggccgattcaccatctccagagacaattccaagaacacactgtttctgcaattgaacagcctgagagctgaggacacggctgtgtattactgtgcgaaagaaggaaacggctatggttaccagtacgccggtatggacgtctggggccaagggaccacggtcaccgtctcc

SEQ ID NO: 642 - DNA, 331 bp, Artificial Sequence
  Synthetic
cagtctgccctgactcagcctgcctccgtgtctgggtctcctggacagtcgatcaccatctcctgcactggcaccaacagtgacgttggtggttatgactatgtctcctggtaccaacagcacccaggcaaagcccccaaactcataatttttgaagtcattaatcgaccctcaggggtttctaatcgcttctctggctccaagtctggcaacacggcctccctgaccatctctgggctccgggctgaggacgaggctgattattactgctgttcatatacaaccagcaccactcgggtcttcggcggagggaccaagctgaccgtcctag

SEQ ID NO: 643 - DNA, 366 bp, Artificial Sequence; identical to SEQ ID NO: 641
  Synthetic

SEQ ID NO: 644 - DNA, 325 bp, Artificial Sequence
  Synthetic
gaaatagtgatgacgcagtctccagccaccctgtctgtgtctccaggggaaagagccaccctctcctgcagggccagcgagagtgttagcagcaagttagcctggtaccagcagaaacctggccaggctcccaggctcctcatctatggtgcatccaccagggccactggtatctcagccaggttcagtggcagtgggtctgggacagatttcactctcaccatcagcagcctggagtctgaagattttgcagtttattactgtcagcagtataatcactggcctccgaacacttttggccaggggaccaagctggagatcaaac

SEQ ID NO: 645 - DNA, 349 bp, Artificial Sequence
  Synthetic
gaggtgcagctggtggagtctgggggaggcttggtacagcctggggggtccctgagactctcctgtgcagcctctggtttcaccttcagcaactacgacatgcactgggtccgccaagttacagggaacggtctggagtgggtcgcagctattggtacttctggtgacacatactatccagactccgtgaagggccgattcaccatctccagagagaatgtcaagaactccttgtttcttcaaatgaactccctgagagccggggacacggctgtctattactgtgcaagagggggtagcagcagctggctctggtacttcgatctctggggccgtggcaccctggtca

SEQ ID NO: 646 - DNA, 325 bp, Artificial Sequence
  Synthetic
gacatccagatgacccagtctccatcctccctgtctgcatctgtaggagacagagtcaccatcacttgccgggcaagtcagagtattagcagccatttaaattggtatcagcaaaaaccagggaaagtccctaaactcctgatctatgctgcatccactttgcaaagtggggtcccatcaaggttcagtggcagtggatctgggacagacttcactctcaccatcagcagtctgcaacctgaagactttgcaacctactactgtcaacagagttatagtatgcccccggtcaccttcggccaagggacacgactggagattaaac

SEQ ID NO: 647 - DNA, 381 bp, Artificial Sequence
  Synthetic
gaggtgcagctggtggagtctgggggaggcttggtacagcctggggggtccctgagactctcctgtgcagcctctggattcaccttcagtaactacgacatgcactgggtccgccaacctacaggaggaggtctggagtgggtctcagctattggtactgctggtgacacatactatctagcctccgtgaagggccgattcaccatctccagagaaaatgccaagaactccttgtctcttcaaatgaacagcctgagagccggggacacggctgtgtattattgtgtaagaggggatactctggttcagggagttattaaggcctactactactactttatggacgtctggggccaagggatcacggtcaccgtctcctca

SEQ ID NO: 648 - DNA, 325 bp, Artificial Sequence
  Synthetic
gacatccagatgacccagtctccatcctccctgtctgcatctgtgggagacagagtcaccatcacttgccgggcaagtcagaacattagcagatatttaaattggtatcagcagaaaccagggaaagcccctcggctcctgatctatgctgcatccactttgcaaagtggggtcccatcaaggttcagtgccagtggatctgggacagacttcactctcaccatcaccaatctgcaacctgaagattttgcagtttattactgtcaacagacttacgttatgcctccctacactcttgcccaggggaccaagctggagatcaaac

SEQ ID NO: 649 - DNA, 382 bp, Artificial Sequence
  Synthetic
caggtgcagctggtggagtctggggggggcgtggtccggcctgggaggtccctgagactctcctgtgcagcctctggattcaccttcagtaaatatggcatgcactgggtccgccaggctccaggcaaggggctggagtgtgtggcatctatagcgtatgatggaagtgatgactcctacgcagactccgtgaagggccgattcatcatctccagagacaattccaagaacacgctgtatctgcaaatgaacagcctgagagctgcggacacggctgtgtattactgtgcgaaagttcttggctcatattgtagtgctagtagctgccacggacaaaggcctgactattggggccagggaaccctggtcaccgtctcctcag

SEQ ID NO: 650 - DNA, 325 bp, Artificial Sequence
  Synthetic
gacatccagatgacccagtctccatcctccctgtctgcatatgtaggagacagagtcaccatcacttgccaggcgagtcaggacattagtaaccatttaaattggtatcagcagaaaccagggaaagcccctaacctcctgatctacgatgcatccaatttggaaacaggggtcccatcaaggttcagtggaagtggatctgggacagatttttctttcaccatcagcagcctgcagcctgaagatattgcaacatattactgtcaacagtatgataatgtccctccgtggacgttcggccaagggaccaaggtggagatcaaac

SEQ ID NO: 651 - DNA, 384 bp, Artificial Sequence
  Synthetic
caggtgcagctggtgcagtctgggactgaggtgaagaagcctggggactcagtgcaggtctcctgcaagacttctggatacagcttcaccggctactatatccactgggtgcgacaggcccctggacaagggcttgagtggatgggacggatcaaccctaacagtggtggcacaaactatgcacagaagtttcagggcagggtcatcatgaccagggacacgtccatcaccacagccttcatggagctgaccagactgagatatgacgacacggccgtctatttctgtgcgagagagccgattgaaggagtaataggtggtatgattgtgaactactactacatggacgtctggggcagagggaccacggtcaccgtctcctca

SEQ ID NO: 652 - DNA, 334 bp, Artificial Sequence
  Synthetic
cagtctgccctgactcagcctgcctccgtgtctgggtctcctggacagtcgatcaccatctcctgcactggaaccagcagtgacgttggaggttattactatgtctcctggtaccaacaacacccaggcaaagcccccaaactcatgatttatgatgtcagtagtcggccctcaggggtttctaatcgcttctctggctccaagtctggcaacacggcctccctgaccatctctgggctccaggctgaggacgaggctgattattactgcagctcatatacaagcagcaacactctcgtggtattcggcggagggaccaagctgaccgtcctag

SEQ ID NO: 653 - DNA, 384 bp, Artificial Sequence
  Synthetic
caggtgcagctggtgcagtctggggctgaggtgaagaagcctggggcctcagtgaaggtctcctgcaaggcttctggatacatcttcaccggctactatatgcactgggtgcgacaggcccctggacaagggcttgagtggatgggacggatcaaccctaatagtggtggctcaaggtatgcagagaagttccagggcagggtcaccatgaccagggacacgtccatcatcacagccttcatggaactgagggggctgaaatctgacgacacggccgtgtattattgtgcgagagagccgattgaagcagttcctgctggtataattgtgaactattactacatggacgtctggggcaacgggaccacggtcaccgtctcctca

SEQ ID NO: 654 - DNA, 334 bp, Artificial Sequence
  Synthetic
cagtctgccctgactcagcctgcctccgtgtctgggtctcctggacagtcgatcaccatctcctgcactggaaccagcagtgacgttggtggttataactatgtctcctggtaccaacaacacccaggcaaagcccccaaactcatgatttatgatgtcactagtcggccctcaggggtttctgatcgcttctctggctccaagtctggcaccacggcctccctgaccatctctgggctccaggctgaggacgaggctgattattactgcagctcatttacaagcgccttcactctcgtggttttcggcggagggaccaaactgaccgtcctag

SEQ ID NO: 655 - DNA, 358 bp, Artificial Sequence
  Synthetic
gaggtgcagctggtgcagtctggagcagaggtgaaaaagcccggggagactctgaagatctcctgtaagggttctggagacagttttagcaattattggatcggctgggtgcgccagagtcccgggaaaggcctggagtggatggcgatcgtctatcctggtgactctgatgccagatacagtccgtcgttccaaggccaggtcactatctcagcggacaagtccgtcaccaccgcctacttgaagtggagcagcctgaaggcctcggacaccgccatatattattgtgtgagaggattaccagtggactggtacttcgatctctggggccgtggcaccctggtcaccgtctcctcag

SEQ ID NO: 656 - DNA, 335 bp, Artificial Sequence
  Synthetic
cagtctgtgctgacgcagccgccctcagtgtctggggccccagagcagagggtcaccatctcctgcactgggtccagctccaacatcggggcaggtcatgatgtacactggtaccagcagctgccaggaacagcccccaaactcctcatctataataacaacaatcggccctcgggggtccctgaccgattctctggctccaagtctggcgcctcggcctccctggccatctctgggctccaggctgaagatgaggctgaatattactgccagtcctatgacaagagcctgagtgtcctttatgtcctcggaactgggaccaaggtcaccgtcct

SEQ ID NO: 657 - DNA, 364 bp, Artificial Sequence
  Synthetic
caggtgcagctgcaggagtcgggcccaggactggtgaagccttcggagaccctgtccctcacctgtaatgtctctggtgacatcatcaataaatattactggagctggatccggcagtccccagggaagggactggagtggattggatacatctactatagtgggaccacctactacaatccctccctcaagagtcgagtcaccatgtccgtgggcacgtccaagcagcagttctccttgaggctgacctctgtgaccgccgcagatacggccgtctattactgtgcgaggatgttatctacggagtggtcatttaactggttcgacccctggggcccgggaaccctggtcaccgtctcctcag

SEQ ID NO: 658 - DNA, 322 bp, Artificial Sequence
  Synthetic
tcctatgagctgactcagccaccctcagtgtccgtgtccccaggacaggcagccagcatcacctgctctggagataaattgggggataaatttgcttgctggtatcagcagaagccaggccagtcccctgtcctggtcatctatcaaaatgacaagcggcccacagggatccctgagcgattctctggctccaactctgggaacacagccactctgaccatcagcgggacccaggctatggatgaggctgactatttctgccaggcgtgggacagtaccagtgcttctgtcttcggaactgggaccaaagtcaccgtcctag

SEQ ID NO: 659 - DNA, 372 bp, Artificial Sequence
  Synthetic
caggtgcagctggtgcagtctgggcctgaggtgaagaagcctgggtcctcggtgaaagtctcctgcaaggcctctggaggcaacttcaacagttataccatcacctgggtgcgacaggcccctggacatgggcttgagtggatgggacggatcatccctactcttggtgtagcaaactacgcactgaacttccaggacagaatcacgattaccgcggacaaatccacgagcacagcctacatggacctgagcagcctgagatctgaggacacggccgtttattattgtgcgagagagactggatacagtggattccttgccgtcgcctacatggacgtctggggcaatgggaccacggtcaccgtctcctca

SEQ ID NO: 660 - DNA, 332 bp, Artificial Sequence
  Synthetic
cagtctgtgctgacgcagccgccctcagtgtctggggccccagggcagagggtcaccatctcctgcaccgggagcagttccaatgtcggggcaggttatgatgtacactggtaccaacaacttccagggacagcccccaaactcctcatctatcgtaataataatcggccctccggggtccctgaccgattctctggctccaagtctggctcctcagcctccctggacatcactgggctccaggctgaggatgaggctgattattactgccagtcctatgacagcagcctgagtgattcggttttcggcggagggaccaagctgaccgtcct

SEQ ID NO: 661 - DNA, 348 bp, Artificial Sequence
  Synthetic
gaggtgcagctggtggagtctgggggaggcttggtccggcctggggggtccctgagactctcctgtgcagcctctggattcaccgtcggtagcaatttcatgagctgggtccgccaggctccagggaaggggctggagtgggtctcacttatttatagcggtggtggcacacactacgcagagtccgtgaagggccgattcaccatctccagagacaaatccaagaacacactgtatcttcaaatgaacagcctgagagctgaggacacggctgtttattactgtgcgaaccagggctactactattacatggacgtctggggcaaagggaccacggtcaccgtctcc

SEQ ID NO: 662 - DNA, 334 bp, Artificial Sequence
  Synthetic
cagtctgccctgactcagcctgcctccgtgtctgggtctcctggacagtcgatcaccatctcctgcactggaaccagcagtgacgttggtgcttataactatgtctcttggcaccaacaccacccaggcaaagcccccaaactcattatttatgacgtcagtaatcggccctcaggggtttctaatcgcttctctggctccaagtctggcaacacggcctccctgaccatctctgggctccaggctgaggacgaggctgattattattgcacctcatatacaaacaccaccactccctgggtgttcggcggagggaccaagttgaccgtcctag

SEQ ID NO: 663 - DNA, 367 bp, Artificial Sequence
  Synthetic
caggtgcagctgcaggagtcgggcccaggactggtgaagccttcacagaccctgtccctcacctgcactgtctctggtggctccatcagcagtggtggttacttctggagctggatccgccagcacccagggaagggcctggagtggcttgggtacaattattacactgggaccccccactacaatccgtccctcaagagtcgccttgttatatccatagacacgtctaagaaccagttctccctgaagctgagctctgtgactgccgcggacacggccgtgtattactgtgcgaggggcgacacatttgggcgagggtattattttgactactggggccagggaaccctggtcaccgtctcctcag

SEQ ID NO: 664 - DNA, 328 bp, Artificial Sequence
  Synthetic
tcctatgagctgactcagccaccctcggtgtcagtggccccaggacagacggccaggattacctgtgggggaaacaacattggaagtaaaagtgtgcactggtaccagcagaagccaggccaggcccctgtgatggtcgtctatgatgatagtgaccggccctcagggatccctgagcgattctctggctccaactctggggacacggccaccctcaccatcagcagggtcgaagccggggatgaggccgactattcctgtcaggtgtgggatagaagtagtgaccatccttgggtgttcggcggagggaccaagctgaccgtcctag

SEQ ID NO: 665 - DNA, 366 bp, Artificial Sequence
  Synthetic
caggtgcagctgcaggagtcgggcccaggactggtgaagccttcacagaccctgtccctcacctgcactgtctctggtggctccatcagcaatggtggttacttctggacctggatccgccagcacccagtgaagggcctggagtggattggatacatctattacagtgggagcccccactacaacccgtccctcaagagtcgactttccatatcactggacacatttaagaaccagttctccctgaatctcagctctgtgactgccgcggacacggccgtgtattactgtgcgaggggcgatacatttgggcgaggctactactttgacttctggggccagggaaccctggtcaccgtctcctca

SEQ ID NO: 666 - DNA, 328 bp, Artificial Sequence
  Synthetic
tcctatgagctgactcagccaccctcggtgtcagtggccccaggacagacggccaggattacctgtgggggaaacaacattggaactaatagtatgcactggtaccagcagaagccaggccaggcccctgtgctcgtcgtctttgatgatagcgaccggccctcagggatccctgagcgcttctctggctccaactctgggaacacggccaccctgaccatcagcagggtcgaagccggggatgaggccgactatcactgtcaggtgtgggatcggagtagtgaccgtccttgggtgttcggcggagggaccaagctgaccgtcctag

SEQ ID NO: 667 - DNA, 367 bp, Artificial Sequence
  Synthetic
gaggtgcagctgttggagtctgggggaggcttggtacagcctggggggtccctaagactctcctgtgcagcctctggattcccctttagcatctatgccatgagctgggtccgccaggctcctgggaaggggctggagtgggtctcaggtatgcgtggcactactggtaccacatactacgccgactccgtgaagggccggttcgccatctccagagacaattccaagaatatgctgcatctgcaaatgaacagcctgagagccgaggacacggccgtgtattactgtgcgaaaagtgaccacggtgactacgtcattggcgcttttgatatctggggccaggggacaatggtcaccgtctcttcag

SEQ ID NO: 668 - DNA, 331 bp, Artificial Sequence
  Synthetic
cagtctgccctgactcagcctccctccgcgtccgggtctcctggacagtcagtcaccatctcctgcactggaaccagcggagacgttggtggttataactatgtctcctggtaccaacagcacccaggcaaagcccccaaactcatgatttatgaggtcagtaagcggccctcaggggtccctgatcgcttctctggctccaagtctggcaacacggcctccctgaccgtctctgggctccaggctgaagatgaggctgattattactgcaactcatatgcaggcagcaacaattgggtgttcggcggagggaccaagctgaccgtcctag

SEQ ID NO: 669 - DNA, 361 bp, Artificial Sequence
  Synthetic
caggtgcagctgcaggagtcgggcccaggactggtgaagccttcggggaccctgtccctcacctgcgctgtctctggtgtctccatcagcaatactaactggtggaattgggtccgccagccccccgggaaggggctggagtggattggggaaatctatcatactgggagcgctagatacaacccgtccctcaggagtcgagtcaccatatcagttgacaagtcgaagaatcagttctccctgaggctgaactcagcgaccgccgcggacacggccatatattactgtgcgagagcccagactcctgagttcggggagttgttatactggggccagggagccctggtcaccgtctcctcag

SEQ ID NO: 670 - DNA, 325 bp, Artificial Sequence
  Synthetic
gacatccagatgacccagtctccatcctccctgtctgcatctgttggagacagagtcaccatcacttgccgggcaagtcagagcattaccgaccatttaaattggtatcagcaaaaaccagggaaagcccccaaactcctgatctatgctgcatccagtttgcaaactggagtcccatccaggttcagtggcagtggatctgagacagatttcactctcaccatcagcactctgcagcctgaagattttgcgacttactactgtcaacagagttacggtcccccgacgtactcttttggccaggggaccaagctggagatcaaac

SEQ ID NO: 671 - DNA, 376 bp, Artificial Sequence
  Synthetic
gaggtgcagctggtggagtctggggggggcttgatacagcctgggcggtccctgagactctcctgtacagcttctggattctccgtcggtgattacgctatgagctggttccgccaggctccaggaaaggggctggagtgggtaggtttccttagaaatcaacattacggtgggacagcagaatacgccgcgtctgtgaaaggcagattctccatctctacagacgcttccaaaaacatcgtctatctgcaaatggacagcctgaaaaccgaggacacagccgtttattactgtgctcgaaacgaccgttatattgtgatagttccagctgaaatgctctactggggccagggaaccctggtcaccgtctcctcag

SEQ ID NO: 672 - DNA, 325 bp, Artificial Sequence
  Synthetic
gaaatagtgatgacgcagtctccagccaccctgtctgtgtctccaggggaaagagccaccctctcctgcagggccactgagagtgtttacagcaatttggcctggtatcagcagaaacctggccaggctcccaggctcctcatgtatgatgcatccaccagggcccctggtatcccagccaggttcagtggcagtgggtctgggacagagttcactctcaccatcagcagcctgcagtctgaagattttgcaacttattactgtcaacaatatagtaactggcctccgatcaccttcggccaagggacacgactggagattaaac

SEQ ID NO: 673 - DNA, 385 bp, Artificial Sequence
  Synthetic
gaggtgcagctggtggagtctgggggaggcttggtccaaccgggggggtccctgagactctcctgtgtagcctctggattcacctccactaactacgacatgcactgggtccgccaggctccaggaagaggtctgcagtgggtctcgagtattggaactgctggtgacacatactatccaggctccgtgaggggccgattcaccatctccagagaaaatgccaagaactccttggatcttcaaatgaacagcctgagagtcggggacacggctgtttattactgtgcaagaggccagagggggtattacgatagaagtggttattactggggttggagggcttttgatatttggggccaagggacaatggtcaccgtctcttcag

SEQ ID NO: 674 - DNA, 319 bp, Artificial Sequence
  Synthetic
tcctatgagctgactcagccaccctcggtgtcagtggccccaggacagacggccaggattacctgtggggggaacaacattggaaataaaagtgtgtattggtaccagcagaagccaggccaggcccctgttctggtcgtctatgatgatagcggccggccctcagggatccctgagcgattctctggctccaactctgcgaacacggccaccctgaccatcagcagggtcgaagccggggatgaggccgactattactgtcaggtgtgggataataatagtgatcagttcggcggagggaccaagctgaccgtcctag

SEQ ID NO: 675 - DNA, 375 bp, Artificial Sequence
  Synthetic
gaggtgcagctgttggagtctgggggaggcttggtacagcctggggggtccctgagactctcctgtgcagcctctggattcacctttagcaaggatgccatgagctgggtccgccaggctccagggaaggggctggagtgggtctcaactgtaactggtagtggtactaacacatactacgcagactccgtgaagggccggttcaccatctccagagacaattccaataacacgctgtatctgcaaatgaacagcctgagagccgaggacacggccgtatattactgtgcgaaccaccctttaggagcagccgagggctactactactactacatggacgtctggggcaaagggaccacggtcaccgtctcctca

SEQ ID NO: 676 - DNA, 328 bp, Artificial Sequence
  Synthetic
gaaattgtgttgacgcagtctccaggcaccctgtctttgtctccaggggaaagaggcaccctctcctgcagggccagtcagcgtgttcccagcagccagttagcctggtaccagcagaaatctggccaggctcccaggctcctcatctatggtgcatctagcagggccagtggcatcccagacaggttcagtggcagtgggtctgggacagacttcactctcaacatcagcagactggagcctgaagattttgcagtgtattactgtcagcagtatggtagcttaagggcgctcactttcggcggagggaccaaggtggagatcaaac

SEQ ID NO: 677 - DNA, 367 bp, Artificial Sequence
  Synthetic
caggtgcagctggtgcagtctggggctgaggtgaagaagcctggggcctcagtgaaagtttcctgcaagacatctggatacaccttcattagttactatatacactgggtgcgacaggcccctggacaagggcttgagtggatgggaataatcaaccctgatggtgataacacaaactacgcacagaagttccagggcagagtcaccatgaccagggacacgtccacgagcacagtctacatggagctgagtagtctgagatttgaggacacggccgtgtattactgtgcgagagggggtgcgataccagccctaaggactgcttttgatatctggggccaagggacaatggtcaccgtctcttcag

SEQ ID NO: 678 - DNA, 316 bp, Artificial Sequence
  Synthetic
gacatccagatgacccagtctccttccaccctgtctgcatctgtaggagacagagtcaccatcacttgccgggccagtcagagtattagtaactggttggcctggtatcagcagaaaccagggaaagcccctaagctcctgatctataaggcgtctagtttagagagtggggtcccatcaaggttcagcggcagtggatctgggacagaattcactctcaccatcagcagcctgcagcctgatgattttgcaacttattactgccaagagtataatagttattattttggccaggggaccaagctggagatcaaac

SEQ ID NO: 679 - DNA, 367 bp, Artificial Sequence
  Synthetic
caggtgcagctggtgcagtcaggggctgaagtgaggaggcctggggcctcagtgaaagtttcctgtaaggcatctggatacaccctcacccactactatatacactgggtgcgacaggcccctggacaagggcttgagtgggtgggaataatcaaccctgatggtgataacacaaactacgcacagaagttccagggcagagtcaccatgactagggacacgtccacgagcacagtctacatggaactgagcagcctgagatctgaggacacggccatattttactgtgcgagagggggtgcaataccagccctaaggtctgcttttgatatctggggccaggggacaatggtcaccgtctcttcag

SEQ ID NO: 680 - DNA, 316 bp, Artificial Sequence
  Synthetic
gacatccagatgacccagtccccttccaccctgtctgcatctgtaggagacagagtcaccatcacttgccgggccagtcagagtattaataactggttggcctggtatcagcagaaaccagggaaagcccctaagctcctgatctataaggcgtctactttagaaagtggggtcccatcaaggttcagcggcagtggatctgggacagaattcactctcaccatcagcagcctgcagcctgatgattttgcaacttattactgccaacagtataatagttatttttttggccaggggaccaagctggagatcaaac

SEQ ID NO: 681 - DNA, 367 bp, Artificial Sequence
  Synthetic
caggtgcagctgcaggagtcgggcccaggactggtgaagccttcacagaccctgtccctcagttgtactgtctctggtggctccatcagtagtgatgattactactggagttggatccgccagcccccagggaagggcctggagtggattgggtacatctactacagtgggagcacgtactacaattcgtccctcaagagtcgagttagcatatcagtagacacgtccaagaaccagttctccctgaagctgagctctgtgactgccgcagacacggccgtgtattactgtgccagatggaaaagatggctacagttcctttattttgactattggggccagggaaccctggtcaccgtctcctcag

SEQ ID NO: 682 - DNA, 331 bp, Artificial Sequence
  Synthetic
cagtctgccctgactcagcctcgctcagtgtccgggtctcctggacagtcagtcaccatctcctgcactggaaccagcagtgatgttggtggttatagctttgtctcctggtaccaacagcacccaggcaaagcccccaaagtcctgatttatgatgtcgataagcggccctcaggggtccctgatcgcctctctggctccaagtctggcaacacggcctccctgaccatctctgggctccaggctgaggatgaggctgattattactgctgctcatatgcaggcagctacactttgatattcggcggagggaccaagctgaccgtcctag

SEQ ID NO: 683 - DNA, 367 bp, Artificial Sequence
  Synthetic
caggtgcagctgcaggagtcgggcccaggactggtgaagccttcacagaccctgtccctcacctgcactgtctctggtggctccatcagcagtggtgattactactggacttggatccgccagcccccagggaagggcctggagtggattgggtacatcttttacagtgggatcacctactacagcccgtccctcaagagtcgacttaccatgtcaatagacacgtccaagagccaattctccctgaacctgagctctgtcactgccgcagacacggccgtgtattactgtgccagatggaaaagattgctacaatcccttcactttgactactggggccagggaatcctggtcaccgtctcctcag

SEQ ID NO: 684 - DNA, 331 bp, Artificial Sequence
  Synthetic
cagtctgccctgactcagcctcgctcagtgtccgggtctcctggacagtcagtcaccatttcctgcactggaactagcagtgatgttggtagttatgactatgtctcctggtaccaacagcacccaggcaaagcccccaaagtcatgatttatggtgtcgatgagcggccctcaggggtccctcatcgcttctctggctccaagtctggcaacacggcctccctgaccatctctgggctccaggctgacgatgaagctgattatttctgctgcttttatgcaggcagctacactttattattcggcggagggaccaaggtgaccgtcctag

SEQ ID NO: 685 - DNA, 349 bp, Artificial Sequence
  Synthetic
gaggtgcagctggtggagtctgggggagggttggtccagccgggggggtccctgagactctcctgtgcagcctctgaattcatcgttagtagcaactacatgacctgggtccgccaggctccagggaaggggctggagtgggtctcaattatgtatcccggtggttccacattctacgcagactccgtgaagggcagattcaccatctccagagacaattccaagaacacgttgtatcttcaaataaataggctgagagccgaggacacggctgtatattactgtgcgagagatatagcaggtcgtcttgactactggggccagggaaccctggtcaccgtctcctcag

SEQ ID NO: 686 - DNA, 325 bp, Artificial Sequence
  Synthetic
gacatccagatgacccagtctccatcctccctgtctgcatctgtaggcgacagagtcaccatcacttgccaggcgagtcaggacatcaacaactatttaaattggtatcagcagaaaccagggaaagcccctaagctcctgatctacgatgcatctaatttggaaacaggggtcccatcaaggttcagtggaagtggatctgggacagatttttctttcaccatcagcagcctgcagcctgaagatattgcaacatattactgtcaacagtatgataatctctctcgactcactttcggcggagggaccaaggtggaaatcaaac

SEQ ID NO: 687 - DNA, 376 bp, Artificial Sequence
  Synthetic
caggtgcagctggtggagtctgggggaggcgtggtccagcctgggaggtccctgagactctcctgtgcagcctctggattcgccttcagtagctatggcatgaactgggtccgccaggctccaggcaaggggctggagtgggtgactactgtatcatctgatggaaatgttaattactatatagattccgtgaagggccgattcaccatctccagagacaattccaagaacacgctgtatctgcaaatgaacagcctgagaggtgacgacacggcagtgtattactgtgcgaaaggcccccggtttggctggagctatagaggggggtctggttttgatatctggggccaagggacaatggtcaccgtctcttcag

SEQ ID NO: 688 - DNA, 322 bp, Artificial Sequence
  Synthetic
gacatccagatgacccagtctccatcctccctgtctgcatctgtaggagacagagtcaccatcacgtgccaggcgagtcaggacattagcaactatttaaattggtatcagcagaagccagggaaagcccctaagctcctgatctacgatgcatccaatttggaaacaggggtcccatcaaggttcagtgggagtggatctgggacagattttactttcaccatcaccagcctgcagcctgaagacattgcaacatattactgtcaacagtatgataatctcccgatcaccttcggccaagggacacgactggagattaaac

SEQ ID NO: 689 - DNA, 381 bp, Artificial Sequence
  Synthetic
caggtgcagctggtgcagtctggggctgaggtgaagaagcctggggcctcagtgaaggtttcctgcaaggcatctggatactccttcgccacctactatatacactgggtgcgacaggcccctggacaagggcttgagtggatgggaataatcgaccctagtggtggtagtacaaactacgcacagaagttccagggcagagtcaccatgaccagggacacgtcgacgagcacagtgtacttggagctgagcagcctgagatccgaggacacggccgtctattactgtgcgagagccgacacccccatagtagtggatactacgtcctatttctactacatggacgtctggggcaaagggaccacggtcaccgtctcctca

SEQ ID NO: 690 - DNA, 334 bp, Artificial Sequence
  Synthetic
cagtctgccctgactcagcctgcctccgtgtctgggtctcctggacagtcgatcaccatctcctgcactggaaccagcagggacattggtttttataagtatgtctcctggtaccaacaacacccaggcaaagcccccaaactcatcatttatgatgtcactaatcggccctcaggggtttctaatcgcttctctggctccaagtctggcaacacggcctccctgaccatctctgggctccaggctgaggacgaggctcattatcactgcagctcatattcaaccgcctacgtccatgtgcttttcggcggagggaccaggctgaccgtcctag

SEQ ID NO: 691 - DNA, 367 bp, Artificial Sequence
  Synthetic
caggtgcagctggtgcagtctggggctgaagtgaggaagcctgggtcctcggtgaaggtctcctgcaaggcttctggaggccccttcgaccagtatactttcagttgggtgcgacaggcccctggacaaggacttgagtggatggcaaggatcacacctgttgttgatttgacaaattacgcacagaaattccagggcagaatcaccattatcacggacaaatctacgagcacagcctacatggagctgagcagcctgagatctgaggacacggccatatattactgtgcgactcccctcaatgattactatgcttcggggaacctcggcctctggggccagggaaccctggtcaccgtctcctcag

SEQ ID NO: 692 - DNA, 322 bp, Artificial Sequence
  Synthetic
gacatccagatgacccagtctccatcctcactgtctgcatctataggagacagagtcaccatcacttgtcgggcgagtcagggcattagctattatctagcctggtttcagcagaaaccaggggaagcccctaggtccctgatctatgatgcatccagtttgcaaagtggggtcccatcaaagttcagcggcagtggatctgggacagatttcactctcaccatcagcagcctgcagcctgaagattctgcaacttattactgccaacaatataatagttaccctctcactttcggcggagggaccaaggtggaaatcaaac

SEQ ID NO: 693 - DNA, 367 bp, Artificial Sequence
  Synthetic
caggtgcagctggtgcagtctgggtctgagatgaagaagcctgggtcctcggtgaaggtctcctgcaaggctgcaggaggcaccctcaacacccatactttcagttgggtgcgacaggcccctggacaaggacttgagtggatgggaaggatcacacccactgtagatctgacaaattacgcacagaagttccagggcagaatcacgattaccgcggacacatccacgaacacagcctacctggaactgaggcgtctgagatctgaggacacggccatttattactgtgcgactcccctcaatgactattatgcttcgggaaacctcggcttatggggccagggaaccctggtcaccgtctcctcag

SEQ ID NO: 694 - DNA, 322 bp, Artificial Sequence
  Synthetic
gacatccagatgacccagtctccatcctcactgtctgcatctataggagacacagtcaccatcacttgtcgggcgagtcagggtattagttattatctagcctggtttcagcggaaaccagggaaagcccctaagtccctgatctatgatgcatccagcttgcaaagtggggtcccatcaaagttcagcggtagtggatccgggacagatttcactctcaccatcagcagcctgcagcctgaagattctgcaacttattactgccaacaatatagtacttatcctctcactttcggcggagggaccaaggtggaaatcaaac

SEQ ID NO: 695 - DNA, 376 bp, Artificial Sequence
  Synthetic
gaggtgcagctggtggagtctggaggaggcttgatccagcctggggggtccctgagactctcctgtgcagcctctgggttcaccgtcagtagcaactacatgagctgggtccgccaggctccagggaaggggctggagtgggtctcagttatttatagcggtggtagcacatactacgcagactccgtgaagggccgattcaccatctccagagacaattccaagaacacgctgtatcttcaaatgaacagcctgagagccgaggacacggccgtgtattactgtgcgagagttgtgggttacgatttttggagtggttatgatggaggttactttgactactggggccagggaaccctggtcaccgtctcctcag

SEQ ID NO: 696 - DNA, 331 bp, Artificial Sequence
  Synthetic
cagtctgccctgactcagcctgcctccgtgtctgggtctcctggacagtcgatcaccatctcctgcactggaaccagcagtgatgttgggagttataaccttgtctcctggtaccaacagcacccaggcaaagcccccaaactcatgatttatgaggtcagtaagcggccctcaggggtttctaatcgcttctctggctccaagtctggcaacacggcctccctgacaatctctgggctccaggctgaggacgaggctgattattactgctgctcatatgcaggtagtagcacttgggtgttcggcggagggaccaagctgaccgtcctag

SEQ ID NO: 697 - DNA, 376 bp, Artificial Sequence
  Synthetic
gaggtgcagctggtggagtctggaggaggcttgctccagcctggagggtccctgagactctcctgtgcagcctctggcttcagcgtcagtagcaactacatgacctgggtccgccaggctccagggaaggggctggagtgggtcgcagctatttacagcggtgacagtacatactacgtagactccgtgaagggccgattcatcatctccagagacaattccaagaacacggtttatcttcacttgagtagcctgagagccgaggacacggccgtatattactgtgcgagacttgtgggttacgattttcggagtggttctgatggcggttattttgactactggggccacggaaccctggtcaccgtctcctcag

SEQ ID NO: 698 - DNA, 331 bp, Artificial Sequence
  Synthetic
cagtctgccctgactcagcctgcctccgtgtctgggtctcctggacagtcgatcaccatctcctgcactggaaccagcagtgatattgggaattataatcttgtctcctggtaccaacagcacccaggcaaagcccccaaactcatgatttatgacgtcagtaagcggccctcaggagtttctaatcgcttctctggctccaagtctggcaacacggcctccctgacaatctctgggctccaggctgaggacgagactgattattactgctgctcatatgcaggtagcagcacttgggtgttcggcggagggaccaagttgaccgtcctag

SEQ ID NO: 699 - DNA, 379 bp, Artificial Sequence
  Synthetic
caggtgcagctggtggagtctgggggaggcgtggtccagcctgggaggtccctgagactctcctgtgcagcctctggattcaccttcagtagctatgctatgcactgggtccgccaggctccaggcaaggggctggagtgggtggcagttatatcatatgatggaagcaataaatactacgcagactccgtgaagggccgattcaccatctccagagacaattccaagaacacgctgtatctgcaaatgaacagcctgagagctgaggacacggctgtgtattactgtgcgaaaaagggtcaaccatattgtggtggtgattgctatttctactactttgactactggggccagggaaccctggtcaccgtctcctcag

SEQ ID NO: 700 - DNA, 325 bp, Artificial Sequence
  Synthetic
gacatccagatgacccagtctccatcctccctgtctgcatctctaggagacagagtcaccatcacttgccaggcgagtcaggacattagcaactatttaaattggtatcagcagaaaccagggaaagcccctaagctcctgatctacgatgcatccaatttggaaacaggggtcccatcaaggttcagtggaagtggatctgggacagattttactttcaccatcagcagcctgcagcctgaagatattgcaacatattactgtcaacagtatgataatctccctccgatcaccttcggccaagggacacgactggagattaaac

SEQ ID NO: 701 - DNA, 379 bp, Artificial Sequence
  Synthetic
caggtgcagctggtggagtcggggggaggcgtggtccagcctgggaggtccctgagactctcctgtgcagtctctggattcaccttcagtcactatgctatgcactgggtccgccaggctccaggcaaggggctggagtgggtggcagttatatcatatgatggagccgataaatactacgcagactccgtgaggggccgattcaccatcgccagagacaattccaagaacactctgtttctgcaaatgagcagcctgcgacctgaggacacggctgtgtattactgtgcgaaaaagggtcaaccatattgcggtggtgattgtcatttctactaccttgactactggggccagggaaccctggtcaccgtctcctcag

SEQ ID NO: 702 - DNA, 325 bp, Artificial Sequence
  Synthetic
gacatccagatgacccagtctccatcctccctgtctgcatctgtaggagacagagtcaccatcacttgccaggcgagtcaggacattagcaatcatttaaattggtatcagcagaaaccagggaaagcccctaagctcctgatctacgatgcatccaatttggaaacaggggtcccctcaaggttcagtggaagtggatctgggacagattttactttcaccatcagcagcctgcaggctgaagatattgcaacatattactgtcaacagtatgataatcttcctccgatcaccttcggccaagggacacgactggagattaaac

SEQ ID NO: 703 - DNA, 379 bp, Artificial Sequence
  Synthetic
caggtgcagctggtgcagtctggggctgaggtgaagaagcctgggtcctcggtgaaggtctcctgcaaggcctctggaggcaccgtcaacaactatgctatcaactgggtgcgacaggcccctggacaagggcttgagtggatgggagggatcgtccctatctttggtacaccaaactacgcacagaagttccagggcagagtcacaattaccgcggacgaatctacgagcacagcctacatggagctgagcagcctgagatctgaggacacggccgtgtattactgtgcgaaagtctcccttacacttcctatagcagcagctccaaggttctggttcgactcctggggccagggaaccctggtcaccgtctcctcag

SEQ ID NO: 704 - DNA, 328 bp, Artificial Sequence
  Synthetic
gaaatagtgatgacgcagtctccagccaccctgtctgtgtctccaggggaaagagccaccctctcctgcagggccagtcagagtgttagcagccacttagcctggtaccagcagaaacctggccaggctcccaggctcctcatttatggtgcatccaccagggccactggtatcccagccaggttcagtggcagtgggtctgggacagagttcactctcaccatcagcagcctgcagtctgaagattttgcagtttattactgtcagcagtatcataattggcctcccgcgctcactttcggcggagggaccaaggtggaaatcaaac

SEQ ID NO: 705 - DNA, 379 bp, Artificial Sequence
  Synthetic
caggtgcagctggtgcagtctggggttgaagtgaagaagcctgggtcctcggtgaaggtctcctgcaaggcttctggaggcaccttcactgactatgctttcagctgggtgcgacaggcccctggacaagggcttgagtggatgggagggatcgtccctatatttgcaacaccagactacgcagagaagttccggggcagagtcacgattaccgcggacgaatccacgagcacagcctacatggagctgagcaccctgaaatccgaggacacggccgtgtattactgtgcgagagcctcccttacacttcctataagagcagctcctaggttctggttcgacgcctggggccagggaaccctggtcaccgtctcctcag

SEQ ID NO: 706 - DNA, 328 bp, Artificial Sequence
  Synthetic
gaaatagtgatgacgcagtctccagccaccctgtctgtgtctccaggggaaagagccaccctctcctgcagggccagtcagggtgttagtacccacttagcctggtaccaacaaaaacctggccaggctcccaggctcctcatctatggtgcatccaccagggccactggtatcccagccaggttcagtggcagtgggtctgggacagagttcactctcaccatcagcagcctgcagtctgaagattttgcagtttattactgtcagcagtatcataagtggcctcccgcgctcactttcggcggagggaccaaggtggagatcaaac

SEQ ID NO: 707 - DNA, 384 bp, Artificial Sequence
  Synthetic
caggtgcagctgcaggagtcgggcccaggactggtgaggccttcacagaccctgtccctcacctgcactgtttctggtggctccatcggcagtggcgcttactggagctggatccgccagcacccagcgaagggcctggagtggattgggtacgtctattatagtgggagcaccttctacaacccgtccctcgagactcgagtttccatatcagtagacatctctaaggaccagttctccctggaactgacttctgtgactgtcgcggacacggccgtgtattactgtgcgagagagaagattgaggttgtctcgattgagatgcgaccccactactacggcatagacgtctggggccaagggaccacggtcaccgtctcctca

SEQ ID NO: 708 - DNA, 325 bp, Artificial Sequence
  Synthetic
gaaatagtgatgacgcagtctccagccaccctgtctgtgtctccaggggaaagagccaccctctcctgcagggccagtcagagtattagcagcaacttagcctggtaccagcagaaacctggccagcctcccaggctcctcatctatggtgcatccaccagggccactggtatcccagccaggttcagtggcagtgggtctgggacagagttcactctcaccatcagcagcctgcagtctgaagatattgcagtgtattactgtcagcactataataactggcccccgtggacgttcggccaagggaccaaggtggatatcaaac

SEQ ID NO: 709 - DNA, 367 bp, Artificial Sequence
  Synthetic
caggtgcagctgcaggagtcgggcccaagactggtgaagccttcggggagcctgtccctcacgtgcgctgtctctggtggctccctcagtagtagtaactggtggaattgggtccgccagtcccccgagaaggggctggaatggattggagaaatctttcatagtgggagcacctactacaacccgtccctcaagagtcgagtcaccatatcagtagacaagtccaagaatcacttctccctgaatctgaggtctgtgaccgccgcggacacggccgtctattactgtgcgggttcatacagtaactacatcgggggggtctggttcgacccctggggccaggggaccctggtcaccgtctcctcag

SEQ ID NO: 710 - DNA, 322 bp, Artificial Sequence
  Synthetic
gacatccagttgacccagtctccatccttcctgtctgcatctgtaggagacagagtcaccatcacttgccgggccagtcagggcattagcagttatttagcctggtatcagcaaaaaccagggaaagcccctaagctcctgatctatgctgcatccactttgcaaagtggggtcccatcaaggttcagcggcagtggatctgggacagaattcactctcacaatcagcagcctgcagcctgaagattttgcaacttattactgtcaacagcttaatagttaccctctcactttcggcggagggaccaaggtggaaatcaaac

SEQ ID NO: 711 - DNA, 367 bp, Artificial Sequence
  Synthetic
caggtgcagctgcaggagtcgggcccaggactggtgaagccttcggggaccctgtccctcacctgcgctgtgtctggaggccccatcagtagtaatcactggtggagttgggtccgccagcccccagggaaggggctggagtggattggggaagtctatcgtaatgggaacaccaactaccacccgtccctcaagagtcgagtcaccatgtccatagacaactccaagaaccagttttccctgagcctgacctctgtgaccgccgcggacacggccgtatattattgtgcaagagggggggatctcgcaatgggccccgaatatcttgacttctggggccagggaaccctggtcaccgtctcctcag

SEQ ID NO: 712 - DNA, 331 bp, Artificial Sequence
  Synthetic
cagtctgccctgactcagcctgcctccgtgtctgggtctcctggacagtcgatcaccatctcttgtactggaaccagcagtgacgttggtgctaataattatgtctcctggtaccaacaacacccaggcaaagcccccaaactcatgatttatgatgtcattaatcggccctcaggggtctctgatcgcttctctggctccaagtctggcaacacggcctccctcaccatctctgggctccaggctgaggacgaggctgattattactgcagttcattttcaactagcagcactcttcttttcggcggggggaccaaactgaccgtcctag

SEQ ID NO: 713 - DNA, 366 bp, Artificial Sequence
  Synthetic
caggtgcagctggtggagtctgggggaggcgtggtccagcctgggaggtccctgagactcctctgtgcagcgtctggcttcaccttcaacacccatggcatgcactgggtccgccaggctccaggcaaggggctggagtgggtggcagtgatttggtttgatggaagtaacaaatactatgcagactccgtgaagggccgattcaccatctcgagagacaattccacgaacaccctctatctgcaaatgaacagcctgagagccgaggacacggctgtgtattattgtgcgagagtttatggtggtctcccctactattacgctatagatgtctggggccaagggaccacggtcaccgtctcctca

SEQ ID NO: 714 - DNA, 334 bp, Artificial Sequence
  Synthetic
cagtctgtgctgacgcagccgccctcagtgtctggggccccagggcagagggtcaccatctcctgcgccgggagcagctccaacatcggggcaggttatggtgtacactggagccaacaacttccgggaagaccccccaaactcctcatctatggtgacagcaatcgcccctctggggtccctgaccgattctctggctccaactctggcacatcagcctccctggccatcactgggcttcaggctgaggatgaggctgtttattactgccagtcgtatgacagaagcctgagagcttgggtgttcggcggagggactaaactgtccgtcctag

SEQ ID NO: 715 - DNA, 361 bp, Artificial Sequence
  Synthetic
caggtgcagctggtggagtctgggggaggcgtggtccagcctgggacgcccctgagactctcctgtgcagcctctggattcaccttcagtagctatgctatgcactgggtccgccaggctccaggcaaggggctggagtgggtggcaatgatatcatatgatggaggcaataaatactacgcggactccgtgaagggccgattcaccatctccagagacaattccaagaacacgctgtttctgcaaatgaacagcctgagaggtgaggacacggctgtgtattactgtgcgaggtcattttccatccgcattggacataaggacaactggggccagggaaccctggtcaccgtctcctcag

SEQ ID NO: 716 - DNA, 334 bp, Artificial Sequence
  Synthetic
aattttatgctgactcagccccactctgtgtcggagtctccggggaagacggtaaccatctcctgcaccggcagcagtggcagcattgccaacaactatgtgcagtggtaccagcagcgcccgggcagtgcccccactcctgtgatctatgaggatgaccaaagaccctctggggtccctgatcgcttctctggctccatcgacagctcctccaactctgcctccctcagcatctctggactgaagactgaggacgaggctgattactactgtcagtcttatgatagcaccaatttttgggtgttcggcggagggaccaagctgaccgtcctag

SEQ ID NO: 717 - DNA, 367 bp, Artificial Sequence
  Synthetic
caggtgcagctggtgcagtctggggctgaggtgaagaagcctggggcctctgtgaagatttcctgcaaggcatctggatacagcttcagcaactactatatacactgggtgcgacaggcccctggacaagggcttgagtggatgggaataatcaaccctagtggtaatagcataagctacgcacagaagttccagggcagagtcaccatgaccggggacacgtccacgagcacagtctacatggagctgagcagcctaagatctgaggacacggccgtatattactgtgcgagatcggttttcccggtaccagctgcggggggttgtgactactggggccagggaaccctggtcaccgtctcctcag

SEQ ID NO: 718 - DNA, 325 bp, Artificial Sequence
  Synthetic
gacatccagatgacccagtctccatcctccctgtctgcatctgtaggagacagagtcaccatcacttgccgggcaagtcagagcattaccacctccttaaattggtatcagcagaaaccagggaaagcccctaagctcctgatctattctgcatccactttggaaagtggggtcccatcaaggttcagtggcagtggatctgggacagatttcactctcaccatcagcagtctgcaacctgaagattttgcaacttattattgtcagcagacttacagagcccctccgtacacttttggccaggggaccaagctggagatcaaac

SEQ ID NO: 719 - DNA, 367 bp, Artificial Sequence
  Synthetic
caggtgcagctggtgcagtctggggctgagctaaagaagcctggggcctcagtgaaggtttcctgcaaggcttctggatataccttctccacctactatatacactgggtgcgacaggcccctggacaagggctagagtggatgggaataatcaaccctgaagctggtagcacaagctatgcacagaagttccagggcagagtcaccatgaccacggacacgtccacgagcacagtctacatggagttgatcagcctgagatctcaggacacggccatatattactgtgcgagagatgctgttggagtcccagctataaactcgcttgagtactggggccagggaaccctggtcaccgtctcctcag

SEQ ID NO: 720 - DNA, 328 bp, Artificial Sequence
  Synthetic
gaaattgtgttgacacagtctccagccaccctgtctttgtctccaggggaaagagccaccctctcctgcagggccagtcagagtattagtagctacttagcctggtaccaacagaaacctggccaggctcccaggctcctcatttatgatgcatccaacagggccactgacatctcagccaggttcagtggcagtgggtctgggacagacttcactctcaccatcagcagcctagagcctgaagattttgcagtttattactgtcagcaccgtagcaactggcctccctcgttcactttcggcggagggaccaaggtggaaatcaaac

SEQ ID NO: 721 - DNA, 367 bp, Artificial Sequence
  Synthetic
caggtgcagctggtgcagtctggggctgaggtgaagacgcctggggcctcagtgaaggtctcctgccaggcatctggagacaccttcaccagccagtatctgcactgggtgcgacaggcccctggacaagggcttgagtggatgggaataatcaaccccactgctggaagcacaacgtacgcacagaagtttcagggcagagtcaccatgaccagggacacgtccacgagcacagtctacatggaattgaggagtctgagatctgaggacatggccgtgtattactgtgcgagaggcggatttatccctatggttcggggatttatcgaccactggggtcagggaaccctggtcaccgtctcctcag

SEQ ID NO: 722 - DNA, 331 bp, Artificial Sequence
  Synthetic
cagtctgccctgactcagcctgcctccgtgtctgggtctcctggacagtcgatcaccatctcctgcactggaaccagcagtgacgttggtggttataactatgtctcctggtaccaacaacacccaggcaaggcccccaaactcatgatttatgatgtcagtaatcggccctcaggggtttctactcgcttctctggctccaagtctggcaacacggcctccctgaccatctctgggctccaggctgaggacgaggctgattattactgcagctcacctacaagcagcaacactcacgtcttcggaactgggaccaaggtcaccgtcctag

SEQ ID NO: 723 - DNA, 367 bp, Artificial Sequence
  Synthetic
caggtgcagctggtgcagtctggggctgaaatgaagaagcctggggcctcagtgaaaatttcctgcaaggcatctggggacaccttcaccaccaactatttccactgggtgcgacaggcccctggacaagggcttgagtggatgggaataatcaaccctagtgctggtagcacaacctacgcacagagatttcagggcagagtcaccatgaccggggactcgtccacgaacacagtctacttggagcttcgcagtctgagatctgaggacacggccatgtatttctgtgcgaaagggtcttatattcctgctatgaggtcgtcgttcgacccctggggccagggaaccctggtcaccgtctcctcag

SEQ ID NO: 724 - DNA, 328 bp, Artificial Sequence
  Synthetic
gaaattgtgttgacgcagtctccaggcaccctgtctttgtctccaggggaaagagccaccctctcctgcagggccagtcagagtgttagtcacaggtacttggcctggtaccagcagaaacctggccaggctcccaggctcctcatcgatggtgcatccaacagggctactggcatcccagacaggttcagtggcagtgggtctgggacagacttcactctcaccatcagcagactggagcctgaagattttggagtgtattactgtcagcaatatggtagctcccctccgttcacttttggccaggggaccaagctggagatcaaac

SEQ ID NO: 725 - DNA, 361 bp, Artificial Sequence
  Synthetic
caggtgcagctggtggagtctgggggaggcgtggtccagcctgggaggtccctgagactctcctgtgcagcctctggattcaccttcagtgactacgctatgcactgggtccgccaggctccagggaaggggctggagtgggtggcaatgatatcctatgatggaaacagtcaatactacgcagactccgtgaagggccgattcaccatttccagagacaattccaagaacacactgtatttgcaaatgaacatcctgagacctgaggacacggctgtctattactgtgcgagaacattttccatccggattggacatcatgactactggggccagggaaccctggtcaccgtctcctcag

SEQ ID NO: 726 - DNA, 334 bp, Artificial Sequence
  Synthetic
aattttatgctgactcagccccactctgtgtcggagtctccggggaagacggtaaccatctcctgcaccggctccagtggcagcattgccagcaactatgtgcattggtaccagcagcgcccgggcagtgcccccaccactgtgatctttgaagataaccaaagaccctctggggtccctgatcggttctctggctccatcgacagctcctccaactctgcctccctcaccatctctggactgaagactgaggacgaggctgactactactgtcagtcttatgatagcagcagtttttgggtgttcggcggagggaccaagctgaccgtcctag

SEQ ID NO: 727 - DNA, 352 bp, Artificial Sequence
  Synthetic
gaggtgcagctggtggagtctggaggaggcttgatccagcctggggggtccctgagactctcctgtgcagcctctgggttcatcgtcagtaggaactacatgagctgggtccgccaggctcccgggaaggggctggagtgggtctcaattatttatagtggtggtagtacattctacgcagactccgtgaagggccgattcaccatctccagagacaattccaagaacacggtgtatcttcaaatgaacagcctgagagccgaggacacggccgtgtattactgtgcgagagattacggtgacttctactttgactactggggccagggaaccctggtcaccgtctcctcag

SEQ ID NO: 728 - DNA, 325 bp, Artificial Sequence
  Synthetic
gaaattgtgttgacgcagtctccaggcaccctgtctttgtctccaggggaaagagccaccctctcctgcagggccagtcagagtgttagcagcagctacttagcctggtaccagcaaaaacctggccaggctcccaggctcctcatctttgatgtatccagcagggccactggcatcccagacaggttcagtggcagtgggtctgggacagacttcactctcaccatcagcagactggagcctgaagattttgcagtgtattactgtcagcagtatggtagctcacctcgtacgttcggccaagggaccaaggtggaaatcaaac

SEQ ID NO: 729 - DNA, 370 bp, Artificial Sequence
  Synthetic
caggtgcagctacagcagtggggcgcaggactgttgaagccttcggagaccctgtccctcacctgcgctgtcaatggtgggtccttaagtctttactattggagttggatccgccagtccccagggaaggggctggagtggattggagaaatcaatcattttggaggctccgactacaagccgtccctcaagagtcgagtcagcatatcagttgacacgtccacgaaccagttctccctgaaattgagctctgtgaccgccgcggacacggctgtttattactgtgcgagaaagcccctcctccacagtaacatttcacctggcgcttttgatatctggggtcaagggacaatggtcaccgtctcttcag

SEQ ID NO: 730 - DNA, 322 bp, Artificial Sequence
  Synthetic
gaaattgtgttgacgcagtctccaggcaccttgtctttgtctccaggggaaagagccaccctctcctgcagggccagtcagagtgttgccggcagctacttagcctggtatcagcagaaacctggccaggctcccaggctcctcatctatggtgcatccagccgggccactggcgtcccagacaggatcagtggcagtgggtctgggacagacttcactctcaccatcagcagactggagcctgaggattttgcagtgtattactgtcagcagtatactaacacacctcggactttcggcggagggaccaaggtggaaatca

SEQ ID NO: 731 - DNA, 367 bp, Artificial Sequence
  Synthetic
caggtgcagctgcaggagtcgggcccagggctggtgacgccttcacagaccctgtccctcacctgcagtgtctctggtggctccatccacagtagggatttctactggggctggatccgccagcacccagggaagggcctggagtggattgggcacatctattacactgggaacacctactacaatccgtccctcaagagtcgagtcaccatatcagcagacacgtctaagaaccagttctccctgaaactgagttctgtgactgccgcggacacggccgtgtattactgtgcaagagcgacagtagtgattaccctccactggttcgacccctggggccagggaaccctggtcaccgtctcctcag

SEQ ID NO: 732 - DNA, 333 bp, Artificial Sequence
  Synthetic
aattttatgctgactcagccccactctgtgtcggagtctccggggaagacggtgaccatctcctgcaccggcagcggtggcagcattgccagcaactatgtgcagtggtaccagcagcgcccgggcagtgcccccaccactgtgatctatgaagataatgaaagaccctctggggtccctgatcggttctctggctccatcgacagctcctccaactctgcctccctcaccatctctggagtgaagactgaggacgaggctgactacttctgtcagtcttatgatgtcggcaatcctgtgatattcggcggagggaccaagctgaccgtccta

SEQ ID NO: 733 - DNA, 361 bp, Artificial Sequence
  Synthetic
gaggtgcagctggtggagtctgggggaggcttgataaagccagggcggtccctgagactctcttgtacagcctctggattcacctttggtgattatgctatgacctggttccgccaggctccagggaaggggctggagtgggtaggtttcattagaagcaaagcttatggtgggacaacaggatacgccgcgtctgtgaaatacagatttaccatctcaagagatgattccaaaagcatcgtctatctgcaaatggacagcctgaaaaccgaggacacagccgtctattactgtactaggtgggacgggtggagtcaacatgactattggggccagggaaccctggtcaccgtctcctcag

SEQ ID NO: 734 - DNA, 335 bp, Artificial Sequence
  Synthetic
gatattgtgatgactcagtctccactctccctgtccgtcacccctggagagccggcctccatctcctgcaggtctagtcagagcctcctgcatagtaatggaatcaactatttcgattggtacctgcagaagccagggcagtctccacagctcctgatctatttgggttctaatcgggcctccggggtccctgacaggttcagtggcagtggatcaggcacagattttacactgaagatcagcagagtggaggctgaggatgttggggtttattactgcatgcaagttctacaaattccgtacacttttggccaggggaccaagctggagatcaa

SEQ ID NO: 735 - DNA, 366 bp, Artificial Sequence
  Synthetic
caggtgcagctgcaggagtcgggcccaggactggtgaagccttcggagaccctgtccctcacctgcactgtctctggtggctccatcactagttactactggacctggatccggcagtccccagggaagggactggagtggattgggtatatctattacattgggagcaccaactacaacccctccctcaagagtcgactcaccatatcactagccacgtcgaagaaccagttctccctgaggctgaactctgtgaccgctgcggacacggccgtgtattactgtgcgagttattacaatgatactagtggttattcatacggtctggacgtctggggccaagggaccacggtcaccgtctcctca

SEQ ID NO: 736 - DNA, 322 bp, Artificial Sequence
  Synthetic
gacatccagatgacccagtctccatcctccctgtctgcatttgtaggagacagagtcaccatcacttgccgggcaggtcagagtattagcagctatttacattggtatcagcagaaaccagggaaagcccctaagctcctgatctatgctacatccactttgcaaagtggagtcccatcaaggttcagtggcagaggatctgggacagatttcactctcaccatcagcggtctccaacctgaagattttgcaacttactactgtcaacagagttacagtacccctcagacgttcggccaagggaccaaggtggaaatcaaac

SEQ ID NO: 737 - DNA, 370 bp, Artificial Sequence
  Synthetic
gaggtgcagctggtgcagtctggagcagaggtgaaaaagcccggggagtctctgaagatctcctgtaaggcttccggatacagctttaccatctactggatcggctgggtgcgccagatgcccgggaaaggcctggagtggatggggatcatctatcctggtgagtctgaaaccagatacagcccgtccttccaaggccaggtcaccatctcagccgacaagtccatcagcaccgcctacctgcagtggaggagcctgaaggcctcggacaccgccatgtattactgtgcgaggggagggccccccgggggggtcaaactggaactgactgactactggggccagggaaccctggtcaccgtctcctcag

SEQ ID NO: 738 - DNA, 334 bp, Artificial Sequence
  Synthetic
cagtctgtgctgactcagccaccctcagcgtctgggacccccgggcagagggtcaccatctcgtgttctgggagcagctccaacatcggagataataccgtaaactggtaccagcagctcccaggaacggcccccaaactcctcatctataataatattcagcggccctcaggggtccctgaccgattctctggctccaagtctggcacctcagcctccctggccatcagtgggctccagtctgaggatgaggctgattattactgtgcatcatgggatgacagcctgaatggtcctgtggtattcggcggagggaccaagctgaccgtcctag

SEQ ID NO: 739 - DNA, 367 bp, Artificial Sequence
  Synthetic
caggtgcagctggtgcagtctggggctgaggtgaagaagcctggggcctcagtgaaggtctcctgcagggcttctggatacaccttccccaactatgatcttaactgggtgcgacaggccactggacaagggcttgagtggatgggatggatgaaccctaacagtggtaacacaggctatgcacagaagttccagggcagaatcaccatgaccaggatcacgtccataagcacagcctacatggagctgagcagcctgagatctgaggacacggccgtatattactgtgcgagaggccgggctaattggaactcgaacttcctccttgactcctggggccagggaaccctggtcaccgtctcctcag

SEQ ID NO: 740 - DNA, 334 bp, Artificial Sequence
  Synthetic
cagtctgccctgactcagcctgcctccgtgtctgggtctcctggacagtcgatcaccatctcctgcactggaaccagcagtgatgttgggggttataaccttgtctcttggtaccaacagtacccaggcaacgtccccaaactcatgatctatgaggacgctaagcggccctcaggggtttctaatcgcttctctggctcgaagtctgccaacacggcctccctgacaatctctgggctccaggctgaggacgaggctgattattactgctgctcatatgcaggtagtagcacccgttatgtcttcggaactgggaccaaggtcaccgtcctag

SEQ ID NO: 741 - DNA, 367 bp, Artificial Sequence
  Synthetic
caggtgcagctggtgcagtctggggctgcggtgaagaagcctggggcctcagtgaaggtctcctgcaaggcttctggatacaccttcaccagttatgatatcaactgggtgcgacaggcccctggacaaggccttgagtggatgggatggatgaaccctaacagtggtaacacaggctttgcacagaggttccagggcagagccaccctgtccagggacacctccataaccacagcctacatggagctgaccaccctcagatctgaggacacggccgtgtattactgtgcgagaggccgggctaactacaactctaagttcctccttgacaactggggccagggaaccctggtcaccgtctcctcag

SEQ ID NO: 742 - DNA, 334 bp, Artificial Sequence
  Synthetic
cagtctgccctgactcagcctgcctccgtgtctgggtctcctggacagtcgatcaccatctcctgcactggaaccagcagtgatgttgggagttataaccttgtctcctggtaccaacaacacccaggcacagcccccaaactcatgatttatgagggcagtaagcggccctcaggggtttctgatcgcttctctggctacaagtctggcaacacggcctccctgacaatctctgggctccaggctgatgacgaggctgattattactgctgctcatttgcagggagtaccacccgttatgtcttcggcactgggaccagggtcaccgtcctag

SEQ ID NO: 743 - DNA, 367 bp, Artificial Sequence
  Synthetic
caggtgcagctggtggagtctgggggaggcgtggtccagcctggggggtccctgagactctcctgtgcagcctctgcattcaccttcagtagttatgctatgcactggatccgccagtctccaggcaaggggctggagtgggtggcagttatatcatctgatggaagcagtaaattctacgcagactccgtgaagggccgattcaccatctccagagacaactccaagaacacactgtatctgcaaatgaacagcctgagcgctgaggacacggctgtgtattactgtgcgagagatctggagaatgtgctgatagaagtggcccttcaggactggggccagggaaccctggtcaccgtctcctcag

SEQ ID NO: 744 - DNA, 325 bp, Artificial Sequence
  Synthetic
gacatccagatgacccagtctccatcctccctgtctgcatctgtaggagacagagtcaccatcacttgccgggcaagtcagagcattaacagctatttaaattggtatcagcagaaaccagggaaagcccctaaactcctgatctatgctgcatccagtttgcacagtggggtcccatcaaggttcagtggcagtggatctgggacagatttcactctcaccatcagcagtctgcaacctgaagattttgcaacttactactgtcaacagagttacactaccctcgcgctcactttcggcggagggaccaaggtggaaatcaaac

SEQ ID NO: 745 - DNA, 367 bp, Artificial Sequence
  Synthetic
caggtgcagctggtggagtctgggggaggcgtggtccagcctgggaggtccctgagactctcctgtgcagcctctggattcagcttcagtacctacaccatgcactgggtccgccagactccagacaaggggctggagtgggtggcagttatttcagatgatggaaagaataagtactacgcagactccatgaagggccgattcaccatctccagagacaattccaagaacacgctgtatctgcaaatgagcagcctcagacctgaggacacggctgtctattactgtgcgagggatctggagaatgtgatgatagaagtggcccttgagtcctggggccagggaaccctggtcaccgtctcctcag

SEQ ID NO: 746 - DNA, 325 bp, Artificial Sequence
  Synthetic
gacatccagatgacccagtctccatcctccctgtctgcatctgtaggagacagagtcaccatcacttgccgggcaagtcagagcattagcagttatttaaattggtatcagcagaaaccagggaaagcccctaagctcctgatctatgctgcatccagcttgcaaagtggggtcccatcaaggttcagtggcagtggatctgggacagatttcactctcaccatcagcagtctgcaacctgaagattttgcaacttattattgtcaacagagttacactaccctcgcgcttactttcggcggagggaccaaggtggagatcaaac

SEQ ID NO: 747 - DNA, 370 bp, Artificial Sequence
  Synthetic
gaggtgcagctggtggagtctgggggagtcgtggtacagccgggggggtccctgagactctcttgtgcagcctctggattcacctttgacgattattccatgcactgggtccgtcaagttccgggaaagggtctggagtggatcgctgttattttttgggatggtaccagtacatactatgcagactcagtgaagggccgattcaccatctccagagacaacagcaaaaagtccctgtatttgcaaatgaacagcctgagaagtgaggacaccgccttgtattactgtgcaaaagattcggaggattgtagtagtaccagctgctatgttgaccactggggccagggaaccctggtcaccgtctcctcag

SEQ ID NO: 748 - DNA, 340 bp, Artificial Sequence
  Synthetic
gacatcgtgatgacccagtctccagactccctggctgtgtctctgggcgagagggccaccatcaactgcaagtccagccagagtgttttttacatctccaacaataagaactacttagcttggtaccagcagaaaccaggacagcctcctaaactgctcatttactgggcatctacccgggagtccggggtccctgaccgattcagtggcggcgggtctgggacagatttcactctcaccatcagcagcctgcaggctgaagatgtggcagtttattactgtcagcaatattataatactccttacacttttggccaggggaccaagctggagatcaaac

SEQ ID NO: 749 - DNA, 373 bp, Artificial Sequence
  Synthetic
caggtgcagctgcaggagtcgggcccaggactggtgaagccttcacagaccctgtccctcacctgcactgtctccggtggctccatcaccagtggagattactactggacttggatccgccagcccccagggaagggcctggagtggattgggtacatctattacagtgggaacacctactacaacctgtccctcaggagtcgaattacaatatcagaagacacgtccaagaaccagttttccctgaagctgagatctgtgactgccgcagacacggccgtgtactactgtgccagagccatgattacgtttgggggagttatcgtcgtcttagactactggggccagggaaccctggtcaccgtctcctcag

SEQ ID NO: 750 - DNA, 334 bp, Artificial Sequence
  Synthetic
cagtctgccctgactcagcctccctccgcgtccgggtctcctggacagtcagtcaccatctcctgcactggaaccagcactgacgttggtggttataactttgtctcctggtaccaacagcacccaggcaaagcccccaaactcatgatttatgaggtcagtaagcggccctcaggggtccctgatcgcttctctggctccaagtctggcaacacggcctccctgaccgtctctgggctccaggctgaggatgaggctgattattactgcagctcatatgcaggcagcaacatcctttatgtcttcggaactgggaccaaggtcaccgtcctag

SEQ ID NO: 751 - DNA, 373 bp, Artificial Sequence
  Synthetic
caggtgcagctgcaggagtcgggcccaggactggtgaagccttcacagaccctgtccctcacctgcactgtctctggtggctccatcagcagtggtgattactactggagttggatccgccagcccccagggaagggcctggagtggattgggtacatctattacagtgacagcacctactacaacccgtccctcaggactcgagttaccatatcagtagacacgtccaagaaccagttctccctgaagctgacctctgtgactgccgcagacacggccgtgtattactgtgccagagctatgattacgtttgggggagttatcgtcctctatgactactggggccagggaaccctggtcaccgtctcctcag

SEQ ID NO: 752 - DNA, 334 bp, Artificial Sequence
  Synthetic
cagtctgccctgactcagcctccctccgcgtccgggtctcctggacagtcagtcaccatctcctgcactggaaccagcagtgacgttggtggttataactatgtctcctggtaccaacagcacccaggcaaagcccccaaactcatgatttatgaggtcactaagcggccctcaggggtccctgctcgcttctctggctccaagtctggcaacacggcctccctgaccgtctctgggctccaggctgaggatgaggctgattattactgcagctcatatgcaggcagcatcctcctttatgtcttcggaactgggaccaaggtcaccgtcctag

SEQ ID NO: 753 - DNA, 367 bp, Artificial Sequence
  Synthetic
gaggtgcagctggtggagtctgggggaggcttggtacagcctggggggtccctgagactctcctgtgcagcctctggattcaccttcagtaactacgacatgcactgggtccgccaagctacaggaagaggtctggagtgggtctcaactattggtactgctggtgacacatactatcctggctccgtgaagggccgattcaccatctccagagaaaatgccaagaactccttgtatcttcaaatgaacagcctgagagccggggacacggctctgtattactgtgcaagagtccgctatgatagtagtggttatttttggagccttgactactggggccagggaaccctggtcaccgtctcctcag

SEQ ID NO: 754 - DNA, 325 bp, Artificial Sequence
  Synthetic
gacatccagatgacccagtctccatcctccctgtctgcatctgtaggagacagagtcaccatcacttgccgggcaagtcagagcattagcaggtatttaaattggtatcagcagaaaccagggaaggcccctaaactcctgatctatgctgcatccagtttgcaaagtggggtcccatcaaggttcagtggcagtggatctgggacagatttcactctcaccatcagcggtctgcaacctgaagattttgcaacttactactgtcaacagagttacagtacccctcagtacacttttggccaggggaccaagctggagatcaaac

SEQ ID NO: 755 - DNA, 367 bp, Artificial Sequence
  Synthetic
gaggtgcagctggtggagtctgggggaggcttggtacagcctggggggtccctgagactctcctgtgcagcctctggattcaccttcagtaactacgacatgcactgggtccgccaagctacaggaaaaggtctggattgggtctcaactattggtactgctggtgacacatactatccaggctccgtgaagggccgattcaccatctccagagaaaatgccaagaactccttgtatcttcaaatgaacagcctgagagccggggacacggctgtgtattactgtgcaagagtccgctttgatactagtggttatttttggagccttgactactggggccagggaaccctggtcaccgtctcctcag

SEQ ID NO: 756 - DNA, 325 bp, Artificial Sequence
  Synthetic
gacatccagatgacccagtctccgtcctccctgtctgcatctgtcggagacagagtcaccatcacttgccgggcaagtcagagcattagcagctatttaaattggtatcagcagaaaccagggaaagcccctaagctcctgatctatgctgcatccagtttgcagagtggggtcccatcaaggttcagtggcagtggatctgggacagatttcactctcaccatcagcagtctgcaacctgaagattttgcaacttactactgtcaacagagttacagtaaccctcagtacacttttggccaggggaccaagctggagatcaaac

SEQ ID NO: 757 - DNA, 364 bp, Artificial Sequence
  Synthetic
caggtgcagctggtggagtctgggggcggcttggtcaagcctggagggtccctgagactctcctgtacagcctctggattcaccttcagtgactactacatgacctggctccgccaggctccagggaaggggctggagtgggtttcatacattagtagtactagtccttacacaagctacgcagactctgtgaagggccgattcaccatctccagagacaacgccaggaactcagtgtatctgcaaatgaacagcctgagagccgaagatacggccatatattactgtgcgagagtccctcctccacagcggctgcacccttttgatgtctggggccaagggacaatggtcaccgtctcttcag

SEQ ID NO: 758 - DNA, 320 bp, Artificial Sequence
  Synthetic
gacatccagatgacccagtctccttccaccctgtctgcatctgtaggagacagagtcaccatcacttgccgggccagtcagagtattagtagctggttggcctggtatcagcagaaacccgggaaagcccctaagctcctgatctatcaggcgtctagtttagaaagtggggtcccatcaaggttcagcggcagtggatctgggacagatttcactctcaccatcagcagcctgcagcctgatgattttgcaacttattactgccaacaatattttcgttattcgtggacgttcggccaagggaccaaggtggaaatcaa

SEQ ID NO: 759 - DNA, 364 bp, Artificial Sequence
  Synthetic
caggtgcagctggtggagtctgggggaggcttggtcaagcctggggggtccctgagactctcctgtacagcctctggattcaccttcagtgactactacatgacctggctccgccaggctccagggaaggggctggagtgggtttcatacattagtagtactagtccttacacaagctacgcagactctgtgaagggccgattcaccatctccagagacaacgccaggaactcagtgtatctgcaaatgaacagcctgagagccgaagatacggccgtatattactgtgcgagagtccctcctccacagcggctgcacccttttgatgtctggggccaagggacaatggtcaccgtctcttcag

SEQ ID NO: 760 - DNA, 320 bp, Artificial Sequence
  Synthetic
gacatccagatgacccagtctccttccaccctgtctgcatctgtaggagacagagtcaccatcacttgccgggccagtcagagtattagtagctggttggcctggtatcagcagaaacccgggaaagcccctaagctcctgatctttaaggcgtctagtttagaaagtggggtcccatcaaggttcagcggcagtggatctgggacagatttcactctcaccatcagcagcctgcagcctgatgattttgcaacttattactgccaacagtattttcgttattcgtggacgttcggccaagggaccaaggtggaaatcaa

SEQ ID NO: 761 - DNA, 367 bp, Artificial Sequence
  Synthetic
cagctgcagctgcaggagtcgggcccaggactggtgaagccttcggagaccctgtccctcacctgcgctgtctctggtggctccatcagcaatagtcctttctactggggctggatccgccagccccccgggaaggggctggagtgcattgggagcatctattatagtgggagcacctactacaacccgtccctcaagagtcgagtcaccatatccgtagacacgtccaagaagcagttctccctgaagctgagctctgtgaccgccgcagacacggctgtgtattactgtgcgagacattttgccgatgggtcggggagagtggttgactcctggggccagggaatcctggtcaccgtctcctcag

SEQ ID NO: 762 - DNA, 325 bp, Artificial Sequence
  Synthetic
gaaattgtgttgacacagtctccagccaccctgtctttgtctccaggggaaagagccaccctctcctgcagggccagtcagagtgttagcagctacttagcctggtaccaacaaaaacctggccaggctcccagcctcctcatctatgatgtatccaacagggccactggcatcccagccaggttcagtggcagtgggtctgggacagacttcactctcaccatcagcagcctagagcctgaagattttgcagtttattactgtcagcagcgtatcaactggcccttgtacacttttggccaggggaccaagctggagatcaaac

SEQ ID NO: 763 - DNA, 367 bp, Artificial Sequence
  Synthetic
cagctgcagctgcaggagtcgggcccaggactggtgaagccttcggagaccctgtccctcacctgcgctgtctctggtggctccatcagcaatagtcctttctactgggcctggatccgccagcccccagggaaggggctggagtgcattgggagcatctattatactgggagcacctactacaacccgtccctcaagagtcgagtcaccatatccgtagacacgtccacgaagcagttctccctgaagctgaggtctgtgaccgccgcagacacggctgtgtattactgtgcgagacattttgccgatggttcggggagagtggttgactactggggccagggaaccctggtcaccgtctcctcag

SEQ ID NO: 764 - DNA, 325 bp, Artificial Sequence
  Synthetic
gaaattgtgttgacacagtctccagccaccctgtctttgtctccaggggagagagccaccctctcctgcagggccagtcagagtgttaccacctacttagcctggtaccaacagaaacctggccaggctcccaggctcctcatctatgatgtttccagcagggccactggcatcccagccaggttcagtggcagtgggtctgggacagacttcactctcaccatcagcagcctcgagcctgaagactttgcagtttattactgtcagcagcgtagcaactggcccttgtacacttttggccaggggaccaagctggagatcaaac

SEQ ID NO: 765 - DNA, 358 bp, Artificial Sequence
  Synthetic
caggtgcagctggtggagtctgggggaggcttggtcaagcctggagggtccctgagactctcctgtgcaggctctggattcaccttcactgactactacatggcctggatccgccaggctccagggaaggggttggagtgggtttcatacattagtactagtgatagattcataaattacgcagactctgtgaagggccgattcaccatctccagagacgacgccaagaattcactgtatctgcaaatgaatagcctgagagccgaggacacggccgtgtattattgtgcgagagatggcggtggctacgatcggtttgaccactggggccagggaaccctggtcaccgtctcctcag

SEQ ID NO: 766 - DNA, 322 bp, Artificial Sequence
  Synthetic
gacatccagatgacccagtctccatcctccctgtctgcatctgtgggagacagagtcaccatcacttgccaggcgagtcaggacattagcaacttattaaattggtatcaacagaaagcagggaaagcccctaagctcctgatctacgatgcatccaatttggaaacaggggtcccatcaaggttcagtggaagtggatctgggacagactttactttcaccatcagcagcctgcagcctgaagatattgcaacatattactgtctacagtatgataatctccctctgacttttggccaggggaccaagctggagatcaaac

SEQ ID NO: 767 - DNA, 358 bp, Artificial Sequence
  Synthetic
caggtgcagctggtggagtctgggggaggcttggtcaagcctggagggtccctgagactctcctgtgcagcctctggattcaccttcagtgactaccacatgacctggatccgccaggctccagggaaggggctggagtgggtttcatacattagtaatagaagtacttacagaaattatgcagactctgtgaagggccgattcactatctccagagacaacgccaagaactcactgtatctgcaaatgaacagcctgagagccgaggacacggccgtgtattactgtgcgagagatggcggtgcctacgatcggtttgactactggggccagggaaccctggtcaccgtctcctcag

SEQ ID NO: 768 - DNA, 322 bp, Artificial Sequence
  Synthetic
gacatccagatgacccagtctccatcctccctgtctgcatctgtaggagacagagtcaccatcacttgccaggcgagtcaggacattaagaagtttttaaattggtatcagcagaaaccagggaaagcccctaagctcctgatctacgatgcatccaatttggagacaggggtcccatcaaggttcagtggaagtggatctgggacagatcttactttcaccatcagcagcctgcagcctgaagatattgcaacatattactgtcaacaatatgataatctccctctgacttttggccaggggaccaagctggagatcaaac

SEQ ID NO: 769 - DNA, 361 bp, Artificial Sequence
  Synthetic
caggtgcagctggtggagtctgggggaggcgtggtccagcctgggaggtccctgagactctcctgtgcagcctctggattcaccttcagtagctatggcatgcactgggtccgccaggctccaggcaaggggctggagtgggtggcagttatatcagatgatggaagtaataaatactatgcagactccgtgaagggccgattcaccatctccagagacaattccaagaacacgctgtatctgcaaatgaacagcctgagagctgaggacacggctgtgtattattgtgcgaaaagttggtggttatcagagaactggttcgacccctggggccagggaaccctggtcaccgtctcctcag

SEQ ID NO: 770 - DNA, 322 bp, Artificial Sequence
  Synthetic
gaaatagtgatgacgcagtctccagccaccctgtctgtgtctccaggggaaagagccaccctctcctgcagggccagtcagagtgttagcagcaacttagcctggtaccagcagaaacctggccaggctcccaggctcctcatctatggtgcatccaccagggccactggtatcccagccaggttcagtggcactgggtctgggacagagttcactctcaccatcagcagcctgcagtctgaagattttgcagtttattactgtcagcagtataataactggcctctcactttcggcggagggaccaaggtggagatcaaac

SEQ ID NO: 771 - DNA, 361 bp, Artificial Sequence
  Synthetic
caggtgcagctggtggagtctgggggaggcgtggtccagcctgggaggtccctgagactctcctgtgcagcctctggattcaccttcagtaactatgggttacactgggtccgccaggctccaggcaagggactggagtgggtggcagttacatcagatgatggaaatagaaaatactatgcagactccgtgaagggccgattcaccatctccagagacgattccaagaacacattgtatctgcagatgaacaacctgagaactgaggacacggctgtgtattactgtgcgaaaagttggtggttatcagagaactggttcgacccctggggccagggaaccctggtcaccgtctcctcag

SEQ ID NO: 772 - DNA, 322 bp, Artificial Sequence
  Synthetic
gaaatagtgatgacgcagtctccagccaccctgtctgtgtctccaggggaaagagccaccctctcctgcagggccagtcagagtgttagaagcaacttagcctggtaccagcagagacctggccaggctcccaggctcctcatctatggtgcattcaccagggccactggtatcccagccaggttcagtgtcagtgggtctgggacagagttcactctcaccatcgacagcctgcagtctgaagattttgcagtttattactgtcagcagtataataactggcctctcactttcggcggagggaccaaggtggagatcaaac

SEQ ID NO: 773 - DNA, 364 bp, Artificial Sequence
  Synthetic
caggtgcagctggtggagtctgggggaggcgtggtccagcctgggaggtccctgagactctcctgtgcagcctctggattcggcctcattacctattctatgcactgggtccgccaggctccaggcaaggggctggagtgggtgggacttatatcatttgatggaaacactacatactacgcagactccgtgaggggccgattcaccatctccagagacaatttggcgaacattctgtatctccaaatgaacagcctgagacctgacgacacggctttgtattactgtgcgagagataagaggggggtgattcggggccttcttaacttctggggccagggatccctggtcaccgtctcctcag

SEQ ID NO: 774 - DNA, 337 bp, Artificial Sequence
  Synthetic
gacatcgtgatgacccagtctccagactccctggctgtgtctctgggcgagagggccaccatcaactgcaagtccagccagagtcttttacccagctccaacagcaacaattacttagcttggtaccagcagaaatcaggacagcctcctaacctgctcatttactgggcatctacccgggaatccggggtccctgaccgattcagtggcagcgggtctgagacagatttcagtctcaccatcagcaacctgcaggctgaagatgtggcagtttattactgtcaacaatattataatactcctcacactttcggcggagggaccaaggtggaaatca

SEQ ID NO: 775 - DNA, 353 bp, Artificial Sequence
  Synthetic
caggtgcagctggtggagtctgggggaggcgtggtccagcctgggaggtccctgagactctcctgtgtagcctctggattcaccttcagttactttgacatgcactgggtccgccaggctccaggcaaggggttggagtgggtggcacttatatcacatgatggaagtactacattctatggagactccgcgaggggccgattcaccatctccagagacaattccaggaacacgctggatttgcaaatgaacagcctgagacctgaggacacggctgtgtatttctgtgcgaaacctgtggatgcagctatgtttgacttctggggccagggaaccctggtcaccgtctcctc

SEQ ID NO: 776 - DNA, 328 bp, Artificial Sequence
  Synthetic
tcctatgagctgactcagccaccctcagtgtcagtggccccaggaaagacggccaggattacctgtgggggcaacaacattggaagtaaaagtgtgcactggtaccagcagaggccaggccaggcccctgtgttggtcatctattatgattccgaccggccctctgggatccctgagcgattctctggctccaactctggaaacacggccaccctgaccatcagcagggtcgaagccggggatgaggccgacttctactgtcaggtgtgggataggagtactaatcatcttgtggtattcggcggagggacccagctgaccgtcctag

SEQ ID NO: 777 - DNA, 355 bp, Artificial Sequence
  Synthetic
caggtgcagctggtggagtctgggggaggcgtggtccagcctgggaggtccctgagactctcctgtgcagcctctggattcaccttcagtttctttgacatgcactgggtccgccaggctccaggcaaggggctggagtgggtggccgatatttcatatgatggaagtaatcaatactatggagactccgtgaagggccgattcaccatctccagagacaattccaagagcaccttgtatctgcaaatgaacagcctgagagctgaggacacggctgtctattactgtgcgaaaccagtggatacagctatgtttgactcctggggccagggaaccctggtcaccgtctcctcag

SEQ ID NO: 778 - DNA, 328 bp, Artificial Sequence
  Synthetic
tcctatgagctgactcagccaccctcagtgtcagtggccccaggagagacggccaggattacctgtgggggaaacaacattggacataaaagtgtgcactggtaccagcagcagccaggccaggcccctgtgttggtcatctattatgatagcgagcggccctcagggatccctgaacgattctctggctccaactctgggaacacggccaccctgaccatcagcagggtcgaagccggggatgaggccgactatcactgtcaggtgtgggatggtggtaatgatcatcttgtgatattcggcggagggaccaagctgaccgtcctag

SEQ ID NO: 779 - DNA, 351 bp, Artificial Sequence
  Synthetic
gaggtgcagctggtggagtctggaggaggcttgatccagcctggggggtccctgagactctcctgtgcagcctctgggttcaccgtcagtagcaactacatgacctgggtccgccaggctccagggaaggggctggagtgggtctcagttatttatagcggtggtaccacatactacgcagactccgtgaagggccgattcaccatctccagagacaattccaagaacacactgtatcttcaaatgaacagcctgagagccgaggacacggccgtgtattactgtgcgagagatttggtggtttgggggatggacgtctggggccaagggaccacggtcaccgtctcctca

SEQ ID NO: 780 - DNA, 322 bp, Artificial Sequence
  Synthetic
gacatccagttgacccagtctccatccttcctgtctgcatctgtaggagacagagtcaccatcacttgccgggccagtcagggcattagcagttatttagcctggtatcagcaaaaaccagggaaagcccctaagctcctgatctatgctgcatccactttgcaaagtggggtcccatcaaggttcagcggcagtggatctgggacagaattcactctcacaatcagcagcctgcagcctgaagattttgcaacttattactgtcaactccttaatagttacccgtacacttttggccaggggaccaagctggagatcaaac

SEQ ID NO: 781 - DNA, 351 bp, Artificial Sequence
  Synthetic
gaggtgcagctggtggagtctggaggaggcttgttccagccgggggggtccctgagactcgcctgtgcagcctctgggatcaccgtcagtagcaactacatgagctgggtccgccagcctccagggaaggggctggagtgggtctcagttatttatgccggcggtagcacattctacgcagactccgtgaagggccgactcaccatctccagagacaattccaagaacacgctgtatcttcaaataaacagcctgagagccgaggacacggccgtgtattactgtgcgagagatttggtggtttgggggatggacgtctggggccaagggaccacggtcaccgtctcctca

SEQ ID NO: 782 - DNA, 322 bp, Artificial Sequence
  Synthetic
gacatccagttgacccagtctccatccttcctgtctgcatctgtaggagacagagtcaccatcacttgccgggccagtcagggcattagcagttatttagcctggtatcagcaaaaaccagggaaagcccctaagctcctgatctatgctgcatccactttgcaaagtggggtcccatcaaggttcagcggcagtggatctgggacagaattcactctcacaatcagcagcctgcagcctgaagattttgcgacttattactgtcaacagctgaatacttacccgtacacttttggccaggggaccaagctggagatcaaac

SEQ ID NO: 783 - DNA, 375 bp, Artificial Sequence
  Synthetic
caggtgcagctggtggagtctgggggaggcgtggtccagcctgggaggtccctgagactctcctgtgcagcctctggattcagcttcagtacctatggcatgcactgggtccgccaggctcctggcaaggggctggagtgggtagcagtcatatcatttgatggaagtcagaaatactatggagactccgtgaagggccgattcaccatctccagagacaatcccaagaacacgctggatctgcaaatgaacagcctgagagctgaggacacggctgtgtattactgtgcgaaagttgtggttcggggagttattataagtctctattacggtatggacgtctggggccaagggaccacggtcaccgtctcctca

SEQ ID NO: 784 - DNA, 319 bp, Artificial Sequence
  Synthetic
tcctatgagctgacacagccaccctcagtgtccgtgtccccaggacagacagccagcatcacctgctctggagataaattgggggataaatctgcttgctggtatcagcagaagccaggccagtcccctgtgctggtcatctatcaagataacaagcggccctcagggatccctgagcgattctctggctccaactctggaaacacagccactctgaccatcagcgggacccaggctatggatgaggctgactattactgtcaggcgtgggacagcagcactgccgttttcggcggggggaccaagctgaccgtcctag

SEQ ID NO: 785 - DNA, 375 bp, Artificial Sequence
  Synthetic
caggtgcagctggtggagtcggggggaagcgtggtccagcctgggaagtccctgagactctcctgtgcaggctctggattcgccttcagcacctatggcatgcactgggtccgccaggctccaggcaagggcctggagtgggtggcagttatatcatctgatggaggtaataaatactatgcagactccgtgaagggccgattcaccatctccagagacaactacgagaacacgttgtatctgcaaatgaacagtctgggagctgaagacacggctgtttattactgtgcgaaagtggcacttcggggagtttttataagtctctactacggtatggacgtctggggccaagggaccacggtcaccgtctcctca

SEQ ID NO: 786 - DNA, 317 bp, Artificial Sequence
  Synthetic
tcctatgagctgactcagccaccctcagtgtccgtgaccccgggacagacagccagcatcacctgctctggagataaattgggggataaatatgcttgttggtttcttcagaagccaggccagtcccctctgttggtcatctatcaagataccaagcggccctcagggatcccagaccgactctctggctccaagtctgggaacacagccactctgaccatcagcgggacccaggctatggatgaggctgactattactgtcagacgtgggacagcagtgctgtggttttcggcggagggaccaaactgaccgtcct

SEQ ID NO: 787 - DNA, 375 bp, Artificial Sequence
  Synthetic
caggtgcagctggtgcagtctggggctgaggtgaagaagcctggggcctcagtgaaggtctcctgcaaggcttctggatacaccttcaccgactactatatacactgggtgcgacaggcccctggacaagggcttgagtggatgggatggatcaatcctaacagtggtggcacaaactatgcacagaagtttcagggcagggtcaccatgaccagggacacgtccatcagcacagcctacatggagctgagcaggctgagatctgacgacacggccgtgtattactgtgcgagagacgttatagttagtatggttcggggagttattttccgtatggacgtctggggccaagggaccacggtcaccgtctcctca

SEQ ID NO: 788 - DNA, 331 bp, Artificial Sequence
  Synthetic
cagtctgtgctgactcagccaccctcagcgtctgggacccccgggcagagggtcaccatctcttgttctggaagcagctccaacatcggaagtaatactgtaaactggtaccagcagctcccaggaacggcccccaaactcctcatctatagtaataatcagcggccctcaggggtccctgaccgattctctgtctccaagtctggcacctcagcctccctggccatcagtgggctccagtctgaggatgaggctgattattactgtgcagcatgggatgacagtctgaatggagtggtattcggcggagggaccaagctgaccgtcctag

SEQ ID NO: 789 - DNA, 375 bp, Artificial Sequence
  Synthetic
caggtgcagctggtgcagtctggggctgaggtgaagaagcctggggcctcagtgaaggtctcctgcaaggcttctggatacaccttcaccgactactatatacactgggtgcgacaggcccctggacaagggcttgagtggatgggatggatcaaccctaacagtggtggcacaaactatgcacagaaatttcagggcagggtcaccatgaccagggacacgtccatcagcacagcctacatggacctgagcaggctgagatctgacgacacggccgtgtattactgtgcgagagacgttataattactatgggtcggggagttgtattccggatggacgtctggggccaagggaccacggtcaccgtctcctca

SEQ ID NO: 790 - DNA, 331 bp, Artificial Sequence
  Synthetic
cagtctgtgctgactcagccaccctcagcgtctgggacccccgggcagagggtcaccatctcttgttctggaagcagctccaatatcggaaataatactgtaaactggtaccagcagttcccaggaacggcccccaaactcctcatccatagtaataatcagcggccctcaggggtccctgaccgattctctggctccaagtctggcacctcagcctccctggccatcagtgggctccagtctgaggatgaggctgattattactgtgcagcatgggatgacagcctgaatggtgtggtattcggcggagggaccaagctgaccgtcctag

SEQ ID NO: 791 - DNA, 376 bp, Artificial Sequence
  Synthetic
caggtgcagctggtggagtctgggggaggcgtggtccagcctgggaggtccctgagactctcctgtgcagcgactggattcactttcagtagttatggcatgcactgggtccgccaggctccaggcaaggggctggagtgggtggcactgatatggtatgacggaagtaatcaatactatgtagactccgtgaagggccgattcaccatctccagagacaattccaagaagacgctgtacctgcaaatgaacagcctgagagtcgaggacacggctgtatattactgtgcgagagattttagcaattcagatatggtaactttaagcgatgcttttgatatctggggccaagggacaatggtcaccgtctcttcag

SEQ ID NO: 792 - DNA, 334 bp, Artificial Sequence
  Synthetic
gacatccagttgacccagtctccatccttcctgtctgcatctgtaggagacagagtcaccatcgcttgccgggccagtcagggcattagcagttatagtagttatttagcctggtatcagcaaaaaccagggaaagcccctaagctcctgatctatgctgcatccactttgcaaagtggggtcccatcaaggttcagcggcagtggatctgggacagaattcactctcacaatcagcagcctgcagcctgaagattttgcaacttattactgtcaacagcttaatagttaccctcttttcactttcggccctgggaccaaagtggatatcaaac

SEQ ID NO: 793 - DNA, 352 bp, Artificial Sequence
  Synthetic
gaggtgcagctggtggagtctggaggaggcttgatccagcctggggggtccctgagactctcctgtgcagcctctgggttcaccgtcagtagtaactacatgagctgggtccgccaggctccagggaaggggctggagtgggtctcagttatttatagcggtggtagcacattctacgcagactccgtgaagggccgattcaccatctccagagacaattcgaagaacacgctgtatcttcaaatgaacagcctgagagccgaggacacggccgtgtattactgtgcgagagacctcggaacggggttattcgactactggggccagggaaccctggtcaccgtctcctcag

SEQ ID NO: 794 - DNA, 325 bp, Artificial Sequence
  Synthetic
gacatccagttgacccagtctccatccttcctgtctgcatctgtaggagacagagtcaccatcacttgccgggccagtcagggcattagcagttatttagcctggtatcagcaaaaaccagggaaagcccctaagctcctgatctatgctgcatccactttgcaaagtggggtcccatcaaggttcagcggcagtggatctgggacagaattcactctcacaatcagcagcctgcagcctgaagattttgcaacttattactgtcaacagcttgatagttaccctccgggcactttcggccctgggaccaaagtggatatcaaac

SEQ ID NO: 795 - DNA, 352 bp, Artificial Sequence
  Synthetic
gaggtgcagctggtggagtctggaggaggcttgatccagcctggggggtccctgagactctcctgtgcagcctctgagttaaccgtcagtagcaactacatgagctgggtccgccaggctccagggaaggggctggaatgggtctcagttatttatcccggtggtagcacattctacgcagactccgtgaagggccgattcaccatctccagagacaattccaagaacacgctgtatcttcaaatgaacagcctgagagccgaggacacggccgtctattactgtgcgagggacctgggaacggggttattcgactactggggccagggaaccctggtcaccgtctcctcag

SEQ ID NO: 796 - DNA, 325 bp, Artificial Sequence
  Synthetic
gacatccagttgacccagtctccatccttcctgtctgcatctgtaggagacagagtcaccatcacttgccgggccagtcagggcattagcagttatttagcctggtatcagcaaaaaccagggaaagcccctaagctcctgatctatgctgcatccactttacaaagtggggtcccatcaaggttcagcggcagtggatctgggacagaattcactctcacaatcagcagcctgcagcctgaagattttgcaacttatttctgtcaactacttaatagtaaccctccgggcactttcggccctgggaccaaagtggatatcaaac

SEQ ID NO: 797 - DNA, 387 bp, Artificial Sequence
  Synthetic
caggtgcagctggtggagtctgggggaggcgtggtccagcctgggaggtccctgagactctcctgtgcagcctctggattcaccttccgtagccatgctatgcactgggtccgccaggctccaggcaaggggctggagtgggtggcaattatatcatctgacggattcaataaatactacgcagactccgtgaagggccgattcaccatctccagagacaattccaagaacacgctgtatgtccacatgaacagcctgagagttgaggacacggctatctactactgtgcgagcggattactatggttcgagacgagagagatttcgggggcccccgactatgggatggccgtctggggccaaggggccacggtcaccgtctcctca

SEQ ID NO: 798 - DNA, 322 bp, Artificial Sequence
  Synthetic
gacatccagatgacccagtctccgtcctccctgtctgcatctgtaggagacagagtcaccatcacttgccgggcaagtcagaatattagcaactttttaaattggtatcagcagaaaccagggaaagcccctaagctcctgatctatgctgcatccagtttgcagagtggggtcccatcaaggtacagtggcagtggatctgggacagatttcactctcaccatcagcagtctacaagctgaagattttgcaacttactactgtcaacagagttacagtaccccgctcactttcggcggagggaccaaggtggaaatcaaac

SEQ ID NO: 799 - DNA, 387 bp, Artificial Sequence
  Synthetic
caggtgcagctggtggagtctgggggaggcgtggtccagcctgggaggtccctgagactctcctgtgcagcctctggtttcaccttcagtagctatgctatgcactgggtccgccaggctccaggcaaggggctggagtcggtggcacttatatcacatgatggaagcaataaataccacgcagactccgtgaagggccgattgaccatctccagggacacctccaagaacacgctgtatctgcaaatggacagcctgagacctgaagacacggctgtgtattactgtgcgagcggattactctggttcgagacggcagggggttcgggggcccccgactacggcatggccgtctggggccaagggaccacggtcaccgtctcctca

SEQ ID NO: 800 - DNA, 322 bp, Artificial Sequence
  Synthetic
gacatccagatgacccagtctccatcctccctgtctgcatctgtaggagacagagtcaccatcacttgccgggcaagtcagagcattagcacctatttaaattggtatcagcagaaaccagggagagcccctaagttcctgatctatgctgcatccagtttgcaaagtggggtcccatcaaggttcagtggcagtggatctgggacagacttcaccctcatcatcagcggtctgcaacctgaagattttgcaacttacttctgtcaacagagttacaataccccgctcactttcggcggagggaccaaggtggagatcaaac

SEQ ID NO: 801 - DNA, 373 bp, Artificial Sequence
  Synthetic
caggtgcagctgcaggagtccggctcaggactggtgaagccttcacagaccctgtccctcacctgcgctgtctctggtggctccgccagcagtggtggttactcctggagctggatccggcagccaccagggaagggcctggagtggattggatacatctatcatagtgggagtacctactacaacccgtccctcaagagtcgagtcaccatatcactagacaggaccaagaaacagttctccctgaagctgagctctgtgaccgccgcggacacggccgtgtattactgcgccagattttgcctgagtgggagccactatttatttgcttttgatatctggggcccagggacaatggtcaccgtctcttcag

SEQ ID NO: 802 - DNA, 328 bp, Artificial Sequence
  Synthetic
cagtctgccctgactcagcctgcctccgtgtctgggtctcctggacagtcgatcaccatctcctgcactgcaaccagcagtgacgttggtggttataactttgtctcctggtaccaacaatacccaggcaaagtccccaaactcttgatttatgatgtcggtaatcggccctcaggggtttctaatcgcttctctggctccaagtctggcaacacggcctccctgaccatctctgggctccaggctgaggacgaggctgattattactgcagttcatatacaaacagcagcacgtttttcggcggagggaccaagctgaccgtcctag

SEQ ID NO: 803 - DNA, 373 bp, Artificial Sequence
  Synthetic
caggtgcagctggtgcagtctggggctgaggtgaagaagcctgggtcctcggtgaaagtctcctgcaaggcttctggaggcacctcccgcagctatcctatcagctgggtgcgacaggcccctggacaagggcttgagtggatgggaaggatcatccctatcgttgggacagcaaactacgcacagaggttccagggcagagtcacgatcaccgcggacgaatccacgggcacagcctacatggagctgagcagcctgagatctgaggacacggccgtgtattactgtgcgagaaatcgcggatatagtgactacgggtcggtttactactttgactactggggccagggaaccctggtcaccgtctcctcag

SEQ ID NO: 804 - DNA, 332 bp, Artificial Sequence
  Synthetic
cagtctgtgctgactcagccgccctcagtgtctggggccccagggcagagggtcaccatctcctgcactgggagcagctccaacatcggggcaggttatgatgtacactggtaccagcagcttccaggagcggcccccaaactcctcatctatcgtaacatcaatcggccctcaggggtccctgaccgattctctggctccaagtctggcacctcagcctccctggccatcactgggctccaggctgacgatgaggctgattattactgccagtcgtatgacagcagcctgagtggttcggtgttcggcggagggaccaagctgaccgtcct

SEQ ID NO: 805 - DNA, 367 bp, Artificial Sequence
  Synthetic
caggtgcagctggtggagtctgggggaggcgtggtccagcctgggaggtccctgagactctcctgtgcagcctctggattcaccttcagtagttatgttatgcactgggtccgccaggctccaggcaaggggctggagtgggtggcaattatctcatctgatggaaacactaaatactacgcagactccgtgaagggccgattcaccatctccagagacaattccaagaacacgttgtatttgcagatgaacagcgtgagaactgacgacacggctgtatattactgtgcgagagatgggaccacgatgactcccacggacctcctgactgactggggccagggaactctggtcaccgtctcctcag

SEQ ID NO: 806 - DNA, 325 bp, Artificial Sequence
  Synthetic
gacatccagatgacccagtctccatcctccctgtctgcatctgtaggagacagagtcagcatcacttgccgggcaagtcagagaattagcagctatttaaattggtatcagcagaaaccagggaaagcccctaagctcctcatctatgctgcatccagtttgcaaagtggggtcccatcaaggttcagtggcagtggatctgggacagatttcactctcaccatcagcagtctgcaacctgaagattttgcaacttactactgtcaacagagttacagtaccccccccctcactttcggccctgggaccaaagtggatatcaaac

SEQ ID NO: 807 - DNA, 367 bp, Artificial Sequence
  Synthetic
caggtgcagctggtggagtctgggggaggcgtggtccagcctgggaggtccctgagactctcctgtgcagcctctggattccccttcagtagctttggcatgcactgggtccgccaggctccaggcagggggctggagtgggtggcacttatattatatgatggagataataaatactatgcagactccgtgaagggccgattcaccatctccagagacaattccaagaacacgctgtatctgcaaatgaacagcctgagagctgaggacacggctgtgtattactgtgcgaaagatataggcgggggcagctcgcccccattttttgactactggggccagggaaccctggtcaccgtctcctcag

SEQ ID NO: 808 - DNA, 325 bp, Artificial Sequence
  Synthetic
tcctatgagctgactcaggcaccctcagtgtcactggccccaggaaagacggccaggattacctgtggggaaaacaacattggaagtaaaagtgtgcactggtaccagcagaagccaggccaggcccctgtgctggtcatctattatgatagtgaccggccctcagggatccctgagcgattctctggctccaactctgggaacacggccaccctgaccatcagcagggtcgaggccggggatgaggccgactattactgtcaggtgtgggatagtagtagtgatcatgtgatgttcggcggagggaccaagctgaccgtcctag

SEQ ID NO: 809 - DNA, 369 bp, Artificial Sequence
  Synthetic
caggtgcagctggtggagtctgggggaggcgtggtccagcctgggaggtccctgagactctcctgtgcagcctctggattcaccttcagtagctatggcatgcactgggtccgccaggctccaggcaaggggctggagtgggtggcagttatatcatatgatggaagttataaatactatgcagactccgtgaagggccgattcaccatctccagagacaattccaagaacacgctgtatctgcaaatgaacagcctgagagctgaggacacggctgtgtattactgtgcgaaaggtagtgggagccagctctactactactacggtatggacgtctggggccaagggaccacggtcaccgtctcctca

SEQ ID NO: 810 - DNA, 325 bp, Artificial Sequence
  Synthetic
gacatccagatgacccagtctccatcctccctgtctgcatctgtaggagacagagtcaccatcacttgccgggcaagtcagagcattagcagctatttaaattggtatcagcagaaaccagggaaagcccctaagctcctgatctatgctgcatccagtttgcaaagtggggtcccatcaaggttcagtggcagtggatctgggacagatttcactctcaccatcagcagtctgcaacctgaagattttgcaacttactactgtcaacagagttacagtaccccccattcgagtttcggccctgggaccaaagtggatatcaaac

SEQ ID NO: 811 - DNA, 365 bp, Artificial Sequence
  Synthetic
caggtgcagctggtgcagtctggggctgaggtgaagaagcctggggcctcagtgaggatttcttgcaaggcatctggatacaccttcaccaactactatatgcactgggtgcgacaggcccctggacaagggcttgagtggatgggaattatcaaccctagtggtggtagcacaacctacgcaccgaagttccaggccagagtcaccatgacccgggacacgtccacgagcacagtctacatggagctgagcagcctgagatctgacgacacggccgtgtattactgtgcgagagattacgtactagtaccagctcgcagcggtatggacgtctggggccaagggaccacggtcaccgtctcctc

SEQ ID NO: 812 - DNA, 322 bp, Artificial Sequence
  Synthetic
gaaattgtgttgacacagtctccagccaccctgtctttgtctccaggggaaagagccaccctctcctgcagggccagtcagagtgttagcagctacttagcctggtaccaacagaaacctggccaggctcccaggctcctcatctatgatgcatccaacagggccactggcatcccagccaggttcagtggcagtgggtctgggacagacttcactctcaccatcagcagccttgagcctgaagattttgcaatttattactgtcagcagcgtagcaactggccgtacacttttggccaggggaccaagctggagatcaaac

SEQ ID NO: 813 - DNA, 367 bp, Artificial Sequence
  Synthetic
caggtgcagctggtgcagtctggggctgaggtgaagaagcctggggcctcagtgaaggtttcctgcaaggcatctggatacaccttcaccaactactatattcactgggtgcgacaggcccctggacaagggcttgagtggatggggataatcaaccctgatggtgatagcacaagctacgtacagaagttccagggcagagtcaccatgaccagggacacgtccacgagcacagtctacatggagctgagcagcctgagatctgaggacacggccgtgtattactgtgcgagagatttggtatttgtaccagctactagtgcaatggacgtctggggcaaagggaccacggtcaccgtctcctcag

SEQ ID NO: 814 - DNA, 322 bp, Artificial Sequence
  Synthetic
gaaattgtgttgacacagtctccagccaccctgtctttgtctccaggggaaagagccaccctctcctgcagggccagtcagagtgttagcagctacttagcctggtaccaacagaaacctggccaggctcccaggctcctcatctatgatgcatccaacagggccactggcatcccagccaggttcagtggcagtgggtctgggacagacttcactctcaccatcagcagcctggagcctgaagattttgcagtttattactgtcagcagcgtagcaactggctattcactttcggccctgggaccaaagtggatatcaaac

SEQ ID NO: 815 - DNA, 370 bp, Artificial Sequence
  Synthetic
caggtgcagctgcaggagtcgggcccaggactggtgaggccctcggggaccctgtccctcacctgcgctgtcactggtggctccattagtagtagtgactgctggagttgggtccgccagcccccagggaaggggctggagtggattggggagatctgtcatggtaggacttctaactacaacccgtcactcaagagtccagtcagcatatcagtagacaagtccaagaaccagttctccctgattctgagctctgtgaccgccgcggacaaggccgtctattactgtgcgagaagttcacgatttttgccccccctgcctgatgcttttgatctctggggccaagggacaatggtcaccgtctcttcag

SEQ ID NO: 816 - DNA, 324 bp, Artificial Sequence
  Synthetic
cagtctgtgctgactcagccgccctcagtgtctggggccccagggcagagggtcaccatctcctgcactgggagcagctccaacatcggggcaggttatgatgtccactggtacaagcagcttccgggaacagcccccaaactcctcatatatggtaacaccaatcggccctcaggggtccctggccgattctctggctccaagtctggcacctcagcctccctggccatcactgggctccaggctgaggatgaggctgattatttctgccagtcgtatgacaccaggctgagtgtggtgttcggcggagggaccaagctgacc

SEQ ID NO: 817 - DNA, 367 bp, Artificial Sequence
  Synthetic
gaggtgcagctggtggagtctgggggaggcttggtacagcctggggggtccctgagactctcctgtgcagcctctggattcaccttcagtagatacgacatgcactgggtccgccaagctacaggaaaaggtctggaatgggtctcaattattggtactgctggtgacacatactatccaggctccgtgaagggccgattcaccatctccagagacaatgccaagaactccttgtttcttcaaatgaacagcctgagagccggggacacggctgtgtattactgtgcaagagccaactatgatagtagtggttaccacaactggttcgacccctggggccagggaaccctggtcaccgtctcctcag

SEQ ID NO: 818 - DNA, 322 bp, Artificial Sequence
  Synthetic
gacatccagatgacccagtctccatcctccctgtctgcatctataggagacagagtcaccatcacttgccgggcaagtcagaacattaacagctatttaaattggtatcagcagaaaccagggaaagcccctaagctcctgatctatgctgcatccagtttgcaaagtggggtcccatcaaggttcagtggcagtggatctgggacagatttcactctcaccatcaacagtctgcaacctgaagattttgcaacttactactgtcaacagagttacagtatgccctcgtggacgttcggccaagggaccaaggtggaaatca

SEQ ID NO: 819 - DNA, 367 bp, Artificial Sequence
  Synthetic
caggtgcagctgcaggagtcgggcccaggactggtgaagcctttacagaccctgtccctcacgtgcactgtctctggtggctccatcagcaatggtgattactactggagttggatccgccagtccccagggaagggcctggagtggattgggaacatcttttacagtggggccacctacttcaacccgtccctcaagagtcgagtaaccctatcagtggacacgtccaagaaccagttctccctgaagctgagctctgtgactgccgcagacacggccgtctattactgtgccagagtcgtcagggtactcccggctgcatcggtcgactgctggggccagggaaccctggtcaccgtctcctcag

SEQ ID NO: 820 - DNA, 328 bp, Artificial Sequence
  Synthetic
cagtctgccctgactcagcctcgctcagtgtccgggtctcctggacagtcagtccccatctcctgcactggaaccagcagtgatgttggtggttatgactatgtctcctggtaccaacagcacccaggcaaagcccccaaactcatcatttatgatgtcagtgagcggccctcaggggtccctgatcgcttctctggctccaagtctggcaacacggcctccctgaccatctctgggctccaggctgaggatgaggctacttattactgctgctcatatgcaggcacctctgtgatgttcggcggagggaccaagctgaccgtcctag

SEQ ID NO: 821 - DNA, 361 bp, Artificial Sequence
  Synthetic
caggtgcagctgcaggagtcgggcccacgactggtgaagccttcggggaccctgtccctcacctgcgctgtctctggtggctccatcagcactactaactggtggagttgggtccgccagcccccaggaaaggggctggagtggattggggaaatccatcatagtgggaacaccaactacaacccgtccctcaagagtcgagtcaccatatcagtggacaggtccaagaaccagttctccctgaagctgagctctgtgaccgccgcggacacggccgtctatttctgtgcgagagatggaggacgacccggggatccttttgatatctggggccaagggacaatggtcaccgtctcttcag

SEQ ID NO: 822 - DNA, 329 bp, Artificial Sequence
  Synthetic
cagtctgccctgactcagcctgcctccgtgtctgggtctcctggacagtcgatcaccatctcctgcactggaaccagcagtgacgttggtggttataactatgtctcctggtaccaacaacacccaggcaaagcccccaacctcatgatttatgatgtcagtgatcggccctcaggggtttctaatcgcttctctggctccaagtctggcaacacggcctccctgaccatctctgggctccaggctgaggacgaggctgattattactgcaactcatttacaagcaacagcactcgagtcttcggaactgggaccaaggtcaccgtcct

SEQ ID NO: 823 - DNA, 364 bp, Artificial Sequence
  Synthetic
gaagtgcagctggtggagtctgggggaggcttggtacagcctggcaggtccctgagactctcctgtgcagcctctggattcacctttgatgattatgccatgcactgggtccggcaagttccagggaagggcctggagtgggtctcaggtgttagttggaatggtgatagcgtaggctatgcggactctatggagggccgattcaccatctccagagacaacgccaagaactccctgtatctgcagatgaacagtctgagaactgaagacacggccttgtattactgtgcaaaaggggtcgactatagcagttcgagcaactttgacttctggggccagggaaccctggtcaccgtctcctcag

SEQ ID NO: 824 - DNA, 322 bp, Artificial Sequence
  Synthetic
gacatccagatgacccagtctccatcttctgtgtctgcatctgtaggagacagagtcaccatcacttgtcgggcgagtcagggtattagcagctggttagcctggtatcagcagaaaccagggaaagcccctaagctcctgatctctcttgcatccagtttgcaaagtggggtcccatcaaggttcagcggcagtggatctgagacagatttcactctcattatcagcagcctgcagcctgaagattttgcaacttactattgtcaacagtctagcagtttccctctcactttcggcggagggaccaaggtggaaatcaaac

SEQ ID NO: 825 - DNA, 364 bp, Artificial Sequence
  Synthetic
caggtgcagctggtggagtctgggggaggcgtggtccagcctgggaagtccctgagactctcctgtgcagcgtctggattcatcttcagtagctatagtatgcattgggtccgccaggctccaggcaaggggctagagtgggtggcagttgtatcaaatgatggaagtggtaaattctacgcagactccgtgaggggccgattcaccattttcagagacaattccaagaacacactatatctgcaagtgagcagcctgagagctgaggacacggctgtctactactgtgcgagagatgcgctgacatctatatcggttctttttgactgctggggccagggaaccctggtcaccgtctcctcag

SEQ ID NO: 826 - DNA, 325 bp, Artificial Sequence
  Synthetic
gacatccagatgacccagtctccatcgtccctgtctgcatctctaggagacagagtcaccatcacttgccgggcaagtcagagcattagcaactatttaaattggtatcagcaaaaaccagggaaagcccctaagctcctgatctatggtgcatccagtttgcaaagtggggtcccatcaaggttcagtggcagtggatctgggacagatttcactctcaccatcagcaatctgcaacctgaagattttgcaacttacttctgtcaacagagttacagtaccccttcggtcactttcggcggagggaccaaggtggagatcaaac

SEQ ID NO: 827 - DNA, 352 bp, Artificial Sequence
  Synthetic
gaggtgcagctggtggagtctgggggaggcttggtccagcctggggggtccttgagactctcctgtgcagcctctggattcatcgtcaccactaattacatgagctgggtccgccaggctccagggaaggggctggagtgggtctcacttatttatcccggtggtagcacattctacgcagactccgtagagggccgattcaccatctccagagacaactccaagaacaccttgtatcttcaagtgaacagcctgagagttgaggacacggctgtctattactgtgcgagagataccttcggtaggggggacgaccactggggccagggaaccctggtcaccgtctcctcag

SEQ ID NO: 828 - DNA, 318 bp, Artificial Sequence
  Synthetic
gacatccagatgacccagtctccatcctccctgtctgcatctgtgggggacagagtcaccatcacttgccaggcgagtcaggacattaacatttatttaaattggtatcagcagagaccggggaaagcccctaagctcctgatctacgatgcatccaatttacaaacgggggtcccatcaaggttcagtggaagtggatctgggacagactttactatcaccattagcagcctgcagcctgaagatattgcaacatattactgtcaacaatatgataatctccctcggagttttggccaggggaccaagctggagatc

SEQ ID NO: 829 - DNA, 384 bp, Artificial Sequence
  Synthetic
caggtgcagctggtggagtctgggggaggcgtggtccagcctgggaggtccctgagactctcctgtgcagactctggattcaccttcagtagctctggcatgcactgggtccgccaggcaccaggcaaggggctggagtgggtgggagttatatcatatgatggtggtaataaatactatgcagactccgtgaagggccgattcaccatctccagagacaattccaagaacacgctgtatctgcaaatgaacagcctgagagcagaggacacggctgtgtattactgtgcgaaagatacccccggaggggacgatattatgactggctgggggttatacggtatggacgtctggggccaagggaccacggtcaccgtctcctca

SEQ ID NO: 830 - DNA, 322 bp, Artificial Sequence
  Synthetic
gacatccagatgacccagtctccatcctccctgtctgcatctgtagaagacagagtcaccatcacttgccgggcaagtcagagcattagcagctatttaaattggtatcagcagaagccagggaaagcccctaaactcctgatctatgctgcaatcagtttgcagagtggggtcccatcaaggttcagtggcagtggatctgggacagagttcactctcaccatcagcagtctgcaacctgaagattttgcaacttactactgtcaacagagttacactaccccctgggcgttcggccaagggaccaaggtggaaatcaaac

SEQ ID NO: 831 - DNA, 370 bp, Artificial Sequence
  Synthetic
caggtgcagctggtggagtctgggggaggcgtggtccagcctgggaggtccctgagactctcctgtgcagcgtctggattcaccttcagtagttttggcatgcactgggtccgccaggctccaggcaaggggctggagtgggtggcagttatatcgtatgatggaagttataaagactatggagactccgtgaagggccgattcaccatctccagagacaattccaagaacacgctgtatctgcaaatgaacagcctgagagccgaggacacggctgtgtattactgtgcgagagacagcaacgtggatacagttatggtgacgtggtttgactactggggccggggaaccctggtcaccgtctcctcag

SEQ ID NO: 832 - DNA, 325 bp, Artificial Sequence
  Synthetic
gacatccagatgacccagtctccaccctccctgtctgcagctgtaggagacagagtcaccatcacttgccgggcaagtcagagcattagcagctatttaaattggtatcagcagaaaccagggaaagcccctaagctcctgatctatgctgcatccagtttgcaaagtggggtcccatcaaggttcagtggcagtggatctgggacagatttcactctcaccatcagcagtctgcaacctgaagattttgcaacttactactgtcaacagagttacagtacccctccctggacgttcggccaagggaccaaggtggaaatcaaac

SEQ ID NO: 833 - DNA, 351 bp, Artificial Sequence
  Synthetic
gaggtgcagctggtggagtctgggggaggcttggtccagcctggggggtccctgagactctcctgtgaagcctctggagtcatcgtcagtagcaactacatgaactgggtccgccaggctccagggaaggggccggagtgggtctcagttctctatgccggtggtagcacattctacgcagactccgtgaagggccgattcaccatctccagagacgattccaagaacacactgtttcttcaaatgaacaacctgagagctgaggacacggctgtctatttctgtgcgagagatttgattgcattcggaatggatgtctggggccaagggaccacggtcaccgtctcctca

SEQ ID NO: 834 - DNA, 319 bp, Artificial Sequence
  Synthetic
gacatccagttgacccagtctccatccttcctgtctgcatctgtaggagacagagtcaccatcacttgccgggccagtcagggcattaacagtgatttagcctggtatcagcaaaaaccagggaaagcccctaagctcctgatctatggtgcatccactttgcaaagtggggtcccatcaaggttcagcggcagtggatctgggacagagttcagtctcacggtcagcagcctgcagcctgaagattttgcaacttattactgtcaacaacttaatagttaccgaaggttcggcggcgggaccaaggtggagatcaaac

SEQ ID NO: 835 - DNA, 367 bp, Artificial Sequence
  Synthetic
cagctgcagctgcaggagtcgggcccaggactggtgaagccttcggagaccctgtccctcacctgcactgtctctggtggctccatcaatactagtacttactactggggctggatccgccagcccccagggaaggggctggagtggattgggaatatctattatagtgggatcacctactacaacccgtccctcaagagtcgagtcaccatatccgtagacacgtccaagaaccagttctccctgaagctgaggtctgtgaccgccgcagacacggctgtgtattactgtgcgagacaacatcgttttggttcggggagttctgagcttctgtggggccagggaaccctggtcaccgtctcctcag

SEQ ID NO: 836 - DNA, 329 bp, Artificial Sequence
  Synthetic
cagtctgccctgactcagcctccctccgcgtccgggtctcctggacagtcagtcaccatctcctgcactggaaccagcagtgacgttggtagttataactatgtctcctggtaccaacagcacccaggcaaagcccccaaactcatgatttatgaggtcactaagcggccctcaggggtccctgatcgcttctctggctccaagtctggcaacacggcctccctgaccgtctctgggctccaggctgacgatgaggctgattattactgcagttcatatgcaggcagcagcaatttggtattcggcggagggaccaagctgaccgtcct

SEQ ID NO: 837 - DNA, 388 bp, Artificial Sequence
  Synthetic
gaggtgcagctggtggagtctgggggaagcttggtaaagcctggggggtccctaagactctcctgtgtagcctctggactcactttcaatcacgcctggatgagctgggtccgccaggctccagggaaggggctggagtgggttggccgtattaaaagtaaaattgatggtgggacaacagactacgctgcacccgtgaaaggcagattcaccatctcaagagatgattcaaaaagcacgcagtatctgcaaatgaacagcctgaaaaccgaggacacagccgtatattactgtaccacagattgcttttggcgcctcgggggcaccacctgctacgagcacgatgcttttgatgtctggggccaagggacaatggtcaccgtctctt

SEQ ID NO: 838 - DNA, 319 bp, Artificial Sequence
  Synthetic
gacatccagatgacccagtctccatcctccctgtctgcatctgtaggagacagagtcaccatcacttgccgggcaagtcaggccattgccacctttttaaattggtatcagcagaaaccagggaaagcccctaagctcctgatctatgctgcgtccagtttacaaagtggggtcccatcaaggttcagtggcagtggatcagggacagatttcactctcaccatcagcagtctgcaacctgaagattttgcgacttactactgtcaacagagttacaattcccttcacttcggcggagggaccaaggtggagatcaaac

SEQ ID NO: 839 - DNA, 393 bp, Artificial Sequence
  Synthetic
caggtgcagctggtgcagtctggggctgaggtgaagaagcctgggtcctcggtgaaggtctcctgcaaggcttctggaggcaccttcagcaggaatgtcatcagctgggtgcgacaggcccctggacaagggcttgagtggatgggagggatcatccctatgtttggtacagcaaactatgcacagaagtttcagggcagagtcacgataagcgcggacgaatccacgagcacagcctacatggagctgagcagcctgagatctgaggacacggccgtgtattactgtgcgagagaagatttcatactagaatcagctcctatacgagaaaattcctactactactacggtatggacgtctggggccaagggaccacggtcaccgtctcctca

SEQ ID NO: 840 - DNA, 325 bp, Artificial Sequence
  Synthetic
gaaattgtgttgacgcagtctccaggcaccctgtctttgtctccaggggaaagagccaccctctcctgcagggccagtcagagtgttagcagcaactacttagcctggtaccagcagaagcctggccaggctcccaggctcctcatctatgatgcatctagcagggccactggcatcccagacaggttcagtggcagtgggtctgggacagacttcactctcaccatcaggagactggagcctgaagattttgcagtgtattactgtcagcagtatggtggctcacctcgcacgttcggccaagggaccaaggtggaaatcaaac

SEQ ID NO: 841 - DNA, 373 bp, Artificial Sequence
  Synthetic
cagctgcagctgcaggagtcgggcccaggactggtgaagccttcggagaccctgtccctcacctgcactgtctctggtggctccgtcagcagtaataatcactactggggctggatccgccagcccccagggaaggggctggagtggattgggagtatctcttctagtgggagcacccaccacaacccgtccctcaggagtcgagtcaccatatccgtagacacgtcgaagaaccacttctccctgaagctgaactctgtgaccgccactgacacggctgtgtattactgtgcgagagtggatagcagtggctggtacacgggggatgtttttgatgtctggggccaagggacaatggtcaccgtctcttcag

SEQ ID NO: 842 - DNA, 322 bp, Artificial Sequence
  Synthetic
gacatccagatgacccagtctccatcctccctgtctgcatctgtaggagacagagtcaccatcacttgccgggcaagtcagaccattaacaactatttaaattggtatcaacagaaaccagggaaaccccctaagctcctgatctatgctgcattcagtttgcacagtggggtcccatcaaggttcagtggcagtagatctgggacagatttcactctcaccatcagtagtctgcaacctgaagattttgcaacttactactgtcaacacagttacagtacgatgtgcagttttggccaggggaccaagctggagatcaaac

SEQ ID NO: 843 - DNA, 345 bp, Artificial Sequence
  Synthetic
gaggtgcagctggtggagtctggaggaggcttgatccagcctggggggtccctgagactctcctgtgcagcctctgggctcaccgtcagtaggaactacatgaactgggtccgccaggccccagggaaggggctggagtgggtctcagttatgtatagcggtggtagcacattctacgcagactccgtgaagggccgattcaccatctccagagacaattccaagaacacgctatatcttcaaatgaacagcctgagagccgaggacacggccgtgtattactgtgcgagagaaagctacggtatggacgtctggggccaagggaccacggtcaccgtctcctca

SEQ ID NO: 844 - DNA, 325 bp, Artificial Sequence
  Synthetic
gaaattgtgttgacgcagtctccaggcaccctgtctttgtctccaggggaaagagccaccctctcctgcagggccagtcagagttttagcagcacctacttagcctggtaccagcagaagcctggccaggctcccaggctcctcatctatggtgcatccagcagggccactggcatcccagacaggttcagtggcagtgggtctgggacagacttcactctcaccatcagcagactggagcctgaagattttgcagtgtattactgtcagcagtatgttacctcaccgtggacgttcggccaagggaccaaggtggaaatcaaac

SEQ ID NO: 845 - DNA, 345 bp, Artificial Sequence
  Synthetic
gaggtgcagctggtggagtctggaggaggcttgatccagcctggggggtccctgagactctcctgtgcagcctctgggctcatcgtcagtaggaactacatgaactgggtccgccaggttcccgggaaggggctggagtgggtctcagttatgtatgccggtggaagcacattctacgcagactccgtgaagggccgattcaccatctccagagacgattccaagaacacgctgtatcttcaaatgaacagcctgagacccgaggacacggccgtgtattactgtgcgagagaaagttacggtatggacgtctggggccaagggaccacggtcaccgtctcctca

SEQ ID NO: 846 - DNA, 325 bp, Artificial Sequence
  Synthetic
gaaattgtgttgacgcagtctccaggcaccctgtctttgtctccaggggaaagagccaccctctcctgcagggccagtcagagtattagcagcacctacttagcctggtaccagcagaaacctggccaggctcccaggctcctcatctatggtgcatccagcagggccactggcatcccagacaggttcagtggcagtgggtctgggacagacttcactctcaccatcagcagactggagcctgaagattttgcagtgtattactgtcagcagtatgttacctcaccgtggacgttcggccaagggaccaaggtggaaatcaaac

SEQ ID NO: 847 - DNA, 361 bp, Artificial Sequence
  Synthetic
caggtgcagctggtgcagtctggggctgaggtgaagaagcctggggcctcagtgaaggtttcctgcaaggcatctggatacaccttcaccagctactatatgcactgggtgcgacaggcccctggacaagggcttgagtggatgggaataatcaaccctagtggtggtagcacaaggtacgcacagaagttccagggcagagtcaccatgaccagggacacgtccacgagcacagtctacatggagctgagcagcctgagatctgaggacacggccgtgtattactgtgcgagagaaggagtgggaggtacttcctactttgactactggggccagggaaccctggtcaccgtctcctcag

SEQ ID NO: 848 - DNA, 325 bp, Artificial Sequence
  Synthetic
tcctatgagctgactcagccaccctcggtgtcagtggccccaggaaagacggccaggattacctgtgggggaaacaacattggaagtaaaagtgtgcactggtaccagcagaagccaggccaggcccctgtgctggtcgtctatgatgatagcgaccggccctcagggatccctgagcgattctctggctccaactctgggaacacggccaccctgaccatcagcagggtcgaagccggggatgaggccgactattactgtcaggtgtgggatagtagtagtgatccttatgtcttcggaactgggaccaaggtcaccgtcctag

SEQ ID NO: 849 - DNA, 352 bp, Artificial Sequence
  Synthetic
caggtgcagctggtgcagtctggggctgaggtgaagaagcctggggcctcagtgaaggtttcctgcaaggcatctggatataccttcaccagccactatatgcactgggtgcgacaggcccctggacaagggcttgagtggatgggaataatcaaccctaggacaagatacgcacagatgttccagggcagagtcagcatgaacagggacacgtccacgagcacagtctacatggagctgagcagcctgacatctgaggacacggccgtctattactgtgcgagagaaggactgggagctactgcctactttgactactggggccagggaaccctggtcaccgtctcctcag

SEQ ID NO: 850 - DNA, 325 bp, Artificial Sequence
  Synthetic
tcctatgagctgactcagccaccctcggtgtcagtggccccaggaaagacggccgggattacctgtgggggaagcgacattggaagtaaaagtgtgcactggtaccagcagaagccaggccaggcccctgtgctggtcgtctatgatgatagcgaccggccctcagggatccctgagcgattctctggctccaactctgggaacacggccaccctgaccatcagcagggtcgaagccggggatgaggccgactattactgtcaggtgtgggatagtagtagtgatccttatgtcttcggaactgggaccaaggtctccgtcctag

SEQ ID NO: 851 - DNA, 361 bp, Artificial Sequence
  Synthetic
caggtgcagctggtggagtctgggggaggcgtggtccagcctgggaggtccctgagactctcctgtgcagcgtctggattcagcttcattaactataacatgcactgggtccgccaggctccaggcaaggggctggagtgggtggcagttatatggtatgatggaagcaataaatactatgcagactccgtgaagggccgattcaccatctccagagacaattccaagaacacgctgtatctgcaaatgaacagcctgagagtcgaggatacggctgtttattactgtgcgagagacccggctataacagaggcagagattgactactggggccaggggaccctggtcaccgtctcctcag

SEQ ID NO: 852 - DNA, 337 bp, Artificial Sequence
  Synthetic
gatgttgtgatgactcagtctccactctccctgcccgtcacccttggacaggcggcctccatctcctgcaggtctagtcaaagcctcgtacacagtgatggaaacacctacttgaattggtttcagcagaggccaggccaatctccaaggcgcctaatttatagggtttctaaccgggactctggggtcccagacagattcagcgccagtgggtcaggcactgatttcacactgaaaatcagcagggtggaggctgaagatgttggggtttattactgcatgcaaggtacacactggccctggacgttcggccaagggaccaaggtggaaatcaaac

SEQ ID NO: 853 - DNA, 366 bp, Artificial Sequence
  Synthetic
caggtgcagctggtgcagtctggggctgaggtgaagaagcctggggcctcagtgaaggtttcctgcaaggcgtctggatacaccttcagcgaccactatatttactgggtgcgacaggcccctggacaagggcttgagtggatgggaataatcaaccctagcgctggtagcacaagctacgcacagaagttccagggcagagtcaccatgaccagggacacgtccacgagcacagtttacatggagctgagcagcctgagatctgaggacacggccgtctattactgcgctagagatattgtattcgtaccagctactatggctatggacgtctggggcctagggaccacggtcaccgtctcctca

SEQ ID NO: 854 - DNA, 322 bp, Artificial Sequence
  Synthetic
gaaattgtgttgacacagtctccagccaccctgtctttgtctccaggggaaagagccaccctctcctgcagggccagtcagagtgttagcaggtacttagcctggtaccaacagaaacctggccaggctcccaggctcctcatctatgatgcatccaacagggccactggcatcccagccaggttcagtggcagtgggtctgggacagacttcactctcaccatcagcagcctagagcctgaagattttgcagtttattactgtcaacagcgtagcaactggctattcactttcggccctgggaccaaagtggatatcaaac

SEQ ID NO: 855 - DNA, 366 bp, Artificial Sequence
  Synthetic
caggtgcagctggtgcagtctggggctgaggtgaagaagcctggggcctcagtgaaggtttcctgcaaggcgtctggatacaccttcagcgaccactatatttactgggtgcgacaggcccctggacaagggcttgagtggatgggaataatcaaccctagtggtggtagcacaagctacgcacagaagttccagggcagagtcaccatgaccagggacacgtccacgagcacagtctacatggagctgagcagcctgaaatctgaggacacggccgtctattactgttctagagatattgtattcgtaccagctactatggctatggacgtctggggccaagggaccacggtcaccgtctcctca

SEQ ID NO: 856 - DNA, 322 bp, Artificial Sequence
  Synthetic
gaaattgtgttgacacagtctccagccaccctgtctttgtctccaggggaaagagccaccctctcctgcagggccagtcagagtgttagcaggtacttagcctggtaccaacagaaacctggccaggctcccaggctcctcatctatgatgcatccaacagggccactggcatcccagccaggttcagtggcagtgggtctgggacagacttcactctcaccatcagcagcctagagcctgaagattttgcagtttattactgtcagcagcgtagcaactggctattcactttcggccctgggaccaaagtggatatcaaac

SEQ ID NO: 857 - DNA, 366 bp, Artificial Sequence
  Synthetic
gaagtgcagctggtggagtctgggggaggcttggtacagcctggcaggtccctgagactctcctgtgcagcctctggattcatctttgataattatgccatgcactgggtccggcaagctccagggaagggcctggagtgggtctcaggtatcagttggaatagtgatagcataggctatgcggactctgtgaagggccgattcaccatctccagagacaacgccaagaactccctctatctgcaaatgagcagtctgagagctgaggacacggccttgtattactgtgcaaaagatctcctagggaactactactactacactttggacgtctggggccaagggaccacggtcaccgtctcctca

SEQ ID NO: 858 - DNA, 333 bp, Artificial Sequence
  Synthetic
cagtctgccctgactcagcctgcctccgtgtctgggtctcctggacagtcgatcaccatctcctgcactggaaccagtagtgacattggtggtaataattatgtctcctggtatcaacaacacccaggcaaagcccccagactcatgatttttgatgtcagttatcggccctcaggggtttctaatcgcttctctggctccaagtctggcaacacggcctccctgaccatctctgggctccaggctgaggacgaggctgattattattgcatctcatatacaaccagcagcactctcggggtcttcggcggagggaccaagctgaccgtccta

SEQ ID NO: 859 - DNA, 361 bp, Artificial Sequence
  Synthetic
caggtgcagctgcaggagtcgggcccaggattggtgaagccttcacagaccctgtccctcacctgcactgtctctggtggctccatcagtagtggtaattactacttgacctggatccggcagcccgccgggaagggactggagtggattgggcatatctataccagtgggagcaccaactacaacccctccctcaagagtcgagtcaccatatcagtagacacgtccatgaaccagttctccctgaagctgagctctgtgaccgccgcagacacggccgtgtattactgtgcgagagacatcccgccaacctggtacttcgatctctggggccgtggcaccctggtcaccgtctcctcag

SEQ ID NO: 860 - DNA, 331 bp, Artificial Sequence
  Synthetic
tcctatgagctgacacagccaccctcggtgtcagtggccccaggaaagacggccaggattacctgtgggggaaacaacattggaagtaaaaatgtgcactggtaccagcagaagccaggccaggcccctgtgctggtcgtctatgatgatagcgaccggccctcagggatccctgagcgattctctggctccaactctgggaacacggccaccctgaccatcagcagggtcgaagccggggatgaggccggctattactgtcaggtgtgggatagtactagtgatcatcttttttgggtgttcggcggagggaccaagctgaccgtcctag

SEQ ID NO: 861 - DNA, 361 bp, Artificial Sequence
  Synthetic
caggtgcagctgcaggagtcgggcccaggattggtgaagccttcacagaccctgtccctcacctgcactgtctctggtgactccatcagcagtggtaattactactggagctggatccggcagcccgccgggaagggactggagtggattgggcatatctataccagtgggagccccaactacaagccctccctcaagagtcgagtcaccatatcactagacacgtccaagaatcagttctccctgaagctgacctctgtgaccgccgcagacacggccatgtattactgtgcgagagacatcccgtcaacctggtacttcgatctctggggccgtggcaccctggtcaccgtctcctcag

SEQ ID NO: 862 - DNA, 331 bp, Artificial Sequence
  Synthetic
tcctatgagctgactcagccaccctcggtgtcagtggccccaggaaagacggccaggattccctgtgggggaaccgacattggaagtaaaaatgtgcactggtaccagcagaagccaggccaggcccctgtgctggccgtctatgatgatagcgaccggccctcagggatccctgagcgattctctggctccaactctgggagcacggccaccctgaccatcagcagggtcgaagccggggatgaggccgactattactgtcaggtgtgggatagtagtggtgatcgtctctcttgggtgttcggcggagggaccaagctgaccgtcctag

SEQ ID NO: 863 - DNA, 394 bp, Artificial Sequence
  Synthetic
gaggtgcagctggtgcagtctggagcagaggtgaaaaagcccggggagtctctgaagatctcctgtaagggttctggatacagctttaccagctactggatcggctgggtgcgccagatgcccgggaaaggcctggagtggatggggatcatctatcctggtgactctgataccagatacagcccgtccttccaaggccaggtcaccatctcagccgacaagtccatcagcaccgcctacctgcagtggagcagcctgaaggcctcggacaccgccatgtattactgtgcgagaatggtgacgtccgggacgtattactatgataatagtggttattcttcgtcgggcccttttgactactggggccagggaaccctggtcaccgtctcctcag

SEQ ID NO: 864 - DNA, 310 bp, Artificial Sequence
  Synthetic
gacatccagttgacccagtctccatcctccctgtctgcatctgtaggagacagagtcaccatcacttgccgggcaagtcagggcattagcagtgctttagcctggtatcagcagaaaccagggaaagctcctaagctcctgatttatgatgcctccagtttggaaagtggggtcccatcaaggttcagcggcagtggatctgggacagatttcactctcaccatcagcagcctgcagcctgaagattttgcaacttattactgtcaacagtttaataatttcggccctgggaccaaagtggatatcaaac

SEQ ID NO: 865 - DNA, 394 bp, Artificial Sequence
  Synthetic
gaggtgcagctggtgcagtctggagcagaggtgaaaaagcccggggagtctctgaagatctcctgtaagggttctggctacagcttcatcagttactggattgtctgggtgcgccagatgcccggcaaaggcctggagtggattgggatcatctatcctggtgactctgacaccatatacagcccgtccttccaaggccaggtcaccctctcagccgacaagtccatcagcaccgcctacctgcagtggagcagcctgaaggcctcggacaccgccatctattactgtgcgaaaatggtgacgtccgggacctcttactatgaaactagaggttatgcttcgtcgggcccctttgacaactggggccagggaaccctggtcaccgtctcctcag

SEQ ID NO: 866 - DNA, 308 bp, Artificial Sequence
  Synthetic
gacatccagttgacccagtctccatcctccctgtctgcatctgtaggagacagagtcaccatcacttgccgggcaagtcagggcattagcagtgctttagcctggtatcaacagaaaccagggaaagctcctaaactcctgatctatgatgcctccagtttggaaagtggggtcccatcaaggttcagcggcagtggatctgggacagatttcactctcaccatcagcagcctgcagcctgaagattttgcaacttattactgtcaacagtctgataatttcggccctgggaccaaagtggatatcaa

SEQ ID NO: 867 - DNA, 350 bp, Artificial Sequence
  Synthetic
gaggtgcagctggtgcagtctggagcagaggtgaaaaagcccggggagtctctgaagatctcctgtaaggtttctggatacagctttatcagccactggatcggctgggtgcgccagatgcccgggaaaggcctggagtggatggggatcatctatcctggtgactctgataccagatacagcccgtccttccaaggccaggtcaccatctcagccgacaagtccatcagcaccgcctacctgcagtggagcagcctgaaggcctcggacaccgccatgtattactgtgcgagacgtggggcaagttgggagctggactactggggccagggaaccctggtcaccgtctc

SEQ ID NO: 868 - DNA, 330 bp, Artificial Sequence
  Synthetic
cagtctgtgctgactcagccaccctcagcgtctgggacccccgggcagagggtcaccatctcttgttctggaagcagctccaacatcgggagtaatcctgtaagctggtaccagcagctcccaggaccggccccccaactcctcatctatggtaatgatcagcggccctcaggggtccctgaccgattctctggctccaagtctggcacctcagcctccctggccatcagtgggctccagtctgaggatgaggctgattattactgtgcagcatgggatgacagcctgaatggttatgtcttcggaactgggaccaaggtcaccgtccta

SEQ ID NO: 869 - DNA, 355 bp, Artificial Sequence
  Synthetic
gaggtgcagctggtgcagtctggagcagaggtgaaaaagcccggggagtctctgaagatctcctgtaagagctctggatacagttttatcagccactggatcggctgggtgcgccagatgcccgggaaaggcctggagtggatggggatcatctggcctggtgactctgataccagatacagtccgtccttccaaggccaggtcaccatctcagtcgacaagtccatcaccaccgtctacctgcagtggagcagcctgaaggccgcggacaccgccatgtattactgtgcgagacgtgggtcaagttgggaggtggactactggggccagggaaccctggtcaccgtctcctcag

SEQ ID NO: 870 - DNA, 331 bp, Artificial Sequence
  Synthetic
cagtctgtgctgactcagccaccctcagcgtctgggacccccgggcagagggtcaccatctcttgttctggaagcagctccaacatcggcagtaatactgtaaactggtacctgcagctcccaggaacggcccccaaactcctcatctatggtaatgatcagcggccctcaggggtccctgaccgattctctggctccaagtctggcacctcagcctccctggccatcagtgggctccagtctgaggatgaggctgactattactgtgcagcatgggatgacaggctgaatggttatgtcttcggaactgggaccacggtcaccgtcctag

SEQ ID NO: 871 - DNA, 370 bp, Artificial Sequence
  Synthetic
gaagtgcagctggtggagtctgggggaggcttggtacagcctggcaggtccctgagactctcctgtgcagcctctggattcacctttgatgattatggcatgcactgggtccggcaagctccagggaagggcctggagtgggtctcaggtattagttggaatggtgatagcataggctatgcggactctgtgaagggccgattcaccatctccagagacaacgccaagacctccctgtatctgcaaatgaaccgtctgagagctgaggacacggccctgtattactgtgcaaaagctgcgagtagaagtaccagaatagggggtgcatttgatatctggggccaagggacaatggtcaccgtctcttcag

SEQ ID NO: 872 - DNA, 329 bp, Artificial Sequence
  Synthetic
cagtctgccctgactcagcctgcctccgtgtctgggtctcctggacagtcgatcaccatctcctgcactggaaccagcagtgatgttgggggttataaccttgtctcctggtaccaacagcacccaggcaaagcccccaaactcatgatttatgagggcagtaagcggccctcaggggtttctaatcgcttctctggctccaagtctggcaacacggcctccctgacaatctctgggctccaggctgaggacgaggctgattattactgctgctcatatgcatatagtttcacaaatgtcttcggcactgggaccaaggtcaccgtcct

SEQ ID NO: 873 - DNA, 370 bp, Artificial Sequence
  Synthetic
gaagtgcagctggtggagtctgggggaggcttggtacagcctggcaggtccctgagactctcctgtgtagcctctggattcacctttgatgattatggcttacactgggtccggcaagctccagggaagggcctggagtgggtctcaggcattagttggaatagtgatagtataggctatgcggactctgtgaagggccgattcgccatctccagagacaacgccaggacctccctgtatctgcaaatgaaccgtctgagagctgaggacacggccttgtattactgtgcaaaagctgcgagtagaagtaccagaatagggggtgcgtttgatatctggggccaagggacaatggtcaccgtctcttcag

SEQ ID NO: 874 - DNA, 328 bp, Artificial Sequence
  Synthetic
cagtctgccctgactcagcctgcctccgtgtctgggtctcctggacagtcgatcaccatctcctgcactggaaccagcagtgatgttgggggttataaccttgtctcctggtaccaacagtacccaggcaaagcccccaaactcatgatttatgaggacagtaagcggccctcaggggtttctcatcgcttctctggctccaagtctggcaacacggcctccctgacaatctcggggctccaggctgaggacgaggctgattattactgctgctcatatgcatttagtttcacaaatgtcttcggcactgggaccaaggtcaccgtcc

SEQ ID NO: 875 - DNA, 370 bp, Artificial Sequence
  Synthetic
caggtccagctggtacagtctggggctgaggtgaagaagcctggggcctcagtgaaggtctcctgcaaggtttccggatacaccctcagtgaattatccatgcactgggtgcgacaggctcctggagaagggcttgagtggttgggaggttttgatcctgaagatggtgaaacaatcaacgcacagaagttccagggcagagtcaccatgaccgaggacagatctacagacacagcctacatggagctgagcagcctgagatctgaggacacggccgtgtattactgtgcaacgcggggtcgatattgtagtagtggtaactgctactatcaccactggggccagggaaccctggtcaccgtctcctcag

SEQ ID NO: 876 - DNA, 322 bp, Artificial Sequence
  Synthetic
gacatccagatgacccagtctccttccaccctgtctgcatctgtaggagacagagtcattatcacttgccgggccagtcagaatattcataactggttggcctggtatcagcagaaaccagggaaagcccctaagctcctgatctataaggcgtctagtttagaaagtggggtcccatcaaggttcagcggcagtggatctgggacagaattcactctcaccatcagcagcctgcagcctgatgattttgcaacttatttctgccaacagtatcatagttattcttggacgttcggccaagggaccaaggtggaaatcaaac

SEQ ID NO: 877 - DNA, 370 bp, Artificial Sequence
  Synthetic
gaggtgcagctgttggagtctgggggaggcttggtacagcctggggggtccctgagactctcctgtgcagcctctggattcacctttagcagctatgccatgaactgggtccgccaggctccagggaaggggctggagtgggtctcagctattagtggtagtggtggtggcacatactacgcagactccgtgaagggccggttcaccatctccagagacaattccaagaacacgctgtatctgcaaatggacagcctgagagccgaggacacggccgtatattactgtgcgaaagatgttccgattgagcagcagctggtaccgacctttgactactggggccagggagccctggtcaccgtctcctcag

SEQ ID NO: 878 - DNA, 325 bp, Artificial Sequence
  Synthetic
gacatccagatgacccagtctccatcctccctgtctgcatctgtaggagacagagtcaccatcacttgccgggcaagtcagagcattagcaggtatttaaattggtatcagcagaaaccagggaaagcccctaagctcctgatctatggtgcatccagtttgcaaagtggggtcccatcaaggttcagtggcagtggatctgggacagatttcactctcaccatcagcagtctgcaacctgaagattttgcaacttactggtgtcaacagagttacagcaccctttcgatcaccttcggccaagggacacgactggagattaaac

SEQ ID NO: 879 - DNA, 370 bp, Artificial Sequence
  Synthetic
gaggtgcagctgttggagtctgggggaggcttggtacagcctggggggtccctgagactctcctgtgtagtctctggattcacctttagcagctatgccatgaactgggtccgccaggctccagggaaggggctggagtgggtctcagttatcggtggtagtggtgatgggagatactacgcagactccgtgaagggccggttcaccatctccagagacaattccaagaacacgttgtatctgcaaatgaacagcctcagaggcgacgacacggccgtatattactgtgcgagagatgtccccgttgagcagcagctggtaccgacctttgactactggggccagggaaccctggtcaccgtctcctcag

SEQ ID NO: 880 - DNA, 325 bp, Artificial Sequence
  Synthetic
gacatccagatgacccagtctccatcctccctgtctgcgtctgtaggagacagagtcaccatcacttgccgggcaagtcagagcattagcaggtatttaaattggtatcagcagaaaccagggaaagcccctaagctcctgatctatgctgcatccagtttgcaaagtggggtcccatcaaggttcagtggcagtggatctgggacagaattcactctcaccatcagcagtctgcaacctgaggattttgcaacttactactgtcaacagagttacagcaccctttcgatcaccttcggccaagggacacgactggagattaaac

SEQ ID NO: 881 - DNA, 382 bp, Artificial Sequence
  Synthetic
caggtgcagctggtggagtctgggggaggcgtggtccagcctgggaggtccctgagactctcctgtgcagcctctggattcaccttcagtacctatggcatgaactgggtccgccaggctccaggcaaggggctggagtgggtggcacttatattatatgatggaagtgataaatactatgcagactccgtgaagagccgattcaccatctccagagacaattccaggaacacgctgtatctgcaaatgactagcctgagagctgaggacacggctgtgtattactgtgcgaaagctttatcatccacgtattactatgatgctagtggtcccgatgcttttgatatctggggccaagggacaatggtcaccgtctcttcag

SEQ ID NO: 882 - DNA, 322 bp, Artificial Sequence
  Synthetic
gacatccagatgacccagtctccttccaccctgtctgcatctgtaggagacagagtcaccatcacttgccgggccagtcagagtattagtagctggttggcctggtatcagcagaaaccagggaaagcccctaagctcctgatctataaggcgtctagtatagaaagtggggtcccaccaaggttcagcggcagtggatctgggacagagttcactctcaccatcagcagcctgcagcctgatgattttgcaacttattactgccaacagtataatagttattcgtacacttttggccaggggaccaagctggagatcaaac

SEQ ID NO: 883 - DNA, 382 bp, Artificial Sequence
  Synthetic
caggtgcagctggtggagtctgggggaggcgtggtccagcctgggaggtccctgagactctcctgtgcagcctctggattcaccttcagtacctatggcatgaactgggtccgccaggctccaggcaaggggctggagtgggtggcacttatattatttgatggaagtgataaatactatgcggactccgtgaagagccgattcaccatctccagagacaattccaggaacacactgtatctgcaaatgaccagcctgagagctgaggacacggctgtgtattactgtgcgaaagctttatcatccacgttttactttgatgctagtggtcccgatgcctttgatatctggggccaagggacaatggtcaccgtctcttcag

SEQ ID NO: 884 - DNA, 322 bp, Artificial Sequence
  Synthetic
gacatccagatgacccagtctccttccaccctgtctgcatctgtgggagacagagtcaccatcacttgccgggccagtcagagtattagtacctggttggcctggtatcagcagaaaccagggaaagcccctcaactcctgatctacaaggcgtctagtatagaaagtggggtcccaccaaggttcagcggcagtggatctgggacagagttcactctcaccatcagcagcctgcagcctgatgattttgcaacttattactgccaacagtataatagttattcgtacacttttggccaggggaccaagctggagatcaaac

SEQ ID NO: 885 - DNA, 385 bp, Artificial Sequence
  Synthetic
caggtgcagctggtgcagtctggggctgaggtgaagaagcctgggtcctcggtgaaggtctcctgcaaggcttctggaggcaccttcactacctatattataagctgggtgcgacaggcccctggacaagggcttgagtggatgggagggatcagccctatgcttggtacagcaaactacgcacagaagttccagggcggagtcacgattaccgcggacgaatccacgaccacagcctacatggagatgagcggcctgagatctgaggacacggccgtgtattattgtgcgagagcccatatgtattgcagtgatggtagctgctacagacagagtggctactttgactcctggggccagggaaccctggtcaccgtctcctcag

SEQ ID NO: 886 - DNA, 327 bp, Artificial Sequence
  Synthetic
cagtctgccctgactcagcctcgctcagtgtccgggtctcctggacagtcagtcaccatcacctgcactggaaccagcagtaatgtaggtggttataagtatgtgtcctggttccaacaacacccaggcaaagcccccaaatttctgatttatgatgtcagtgagcggtcctcaggggtccctgatcgcttctctggctctaagtctggcaacacggcctccctgaccatctctgggctccaggctgaggatgaggctgattattactgctgctcatatgcaggcaagtacaccgtagtcttcggcggagggaccagactgaccgtc

SEQ ID NO: 887 - DNA, 347 bp, Artificial Sequence
  Synthetic
gaggtgcagctggtggagtctgggggaggcttggtccagcctggggggtccctgagactctcctgtgcagcctctggaatcatcgtcagtagtaactacatgaattgggtccgccaggttccagggaaggggctggagtgggtctcagttctttatagcggtggtagcacattctacgcagactccgtgaggggccgattcaccatctccagagacaattccaagaacacgctgtttcttcaaatgaacagcctgagacctgaggacacggctgtgtattactgtgcgagagatttccgagaaggtgcttttgatatctggggccaagggacaatggtcaccgtctc

SEQ ID NO: 888 - DNA, 322 bp, Artificial Sequence
  Synthetic
gacatccagttgacccagtctccatccttcctgtctgcatctgtaggagacagagtcaccatcacttgccgggccagtcagggcattagcagttatttagcctggtatcagcaaaaaccagggaaagcccctaacctcctgatctatgctgcatccactttgcaaagtggggtcccatcaaggttcagcggcagtggatctgggacagatttcactctcacaatcagcagcctgcagcctgaagattttgcaacttattactgtcaacagcttaatagttattccccccttttcggccaagggacacgactggagattaaac

SEQ ID NO: 889 - DNA, 352 bp, Artificial Sequence
  Synthetic
gaggtgcagctggtggagtcggggggaggcttggtccagccgggggggtccctaagactctcctgtgcagcctctggagtcaccgtcagttacaactacatgcactgggtccgccaggctccagggaaggggctggagtgggtctcagttttttttcccggtggtagtatattctacgcagactccgtgaagggccgattcagcatctccagagacaattctcacaacacgctttatcttcaaatgaacaacttgagacctgaggacacggctgtctattactgtgcgagagattttcgagaaggggctattgatctctggggccaagggacaatggtcaccgtctcttcag

SEQ ID NO: 890 - DNA, 322 bp, Artificial Sequence
  Synthetic
gacatccagttgacccagtctccatccttcctgtctgcatctgtagaagacagagtcaccatcacttgccgggccagtcagggcattagcagttatttagcctggtatcagcaaaaaccagggaaagcccctaagctcctgatctatggtgcatccactttgcaaagtggggtcccatcaaggttcagcggcagtggatctgggacggagttcactctcacaatcagcagcctgcagcctgaagattctgcaacttattactgtcaacagcttaatagttaccccccccttttcggccaagggacacgactggagattaaac

SEQ ID NO: 891 - DNA, 352 bp, Artificial Sequence
  Synthetic
gaggtgcagctggtggagtctgggggagacttggtccagccgggggggtccctgagactctcctgtgcagcctctgaaatcatcgtcagtagaaattacatgaactgggtccgccaggctccagggaaggggctggagtgggtctcaattatttatagcggcgggagtacgttctacggagactccgtgaagggccgattcaccatctccagagacagttccaagaacacgctgtatcttcaaatgcatggcctgagagttgaggacacggctatatattactgtgcgaggtcgtacggtgactactatattgactactggggccagggaaccctggtcaccgtctcctcag

SEQ ID NO: 892 - DNA, 328 bp, Artificial Sequence
  Synthetic
gacatccagatgacccagtctccatcttccgtgtctgcatctgtaggagacagagtcaccatcacttgtcggacaagtcagagtattagcacctcgttagcctggtatcagcagaaaccagggaaagctcctaagctcctgatctatgctgcatccagtttgcagcgtggggtcccatctaggttcagcggcactggatctgggacagatttcactctcaccatcagcagcctgcagcctgaagattttgcaacttactactgtcaacagtctagcagttcccctcccctattcactttcggccctgggaccaaagtggatatcaaac

SEQ ID NO: 893 - DNA, 361 bp, Artificial Sequence
  Synthetic
gaggtgcagctggtggagtctgggggaggcttggtacagcctggggggtccctgagactctcctgtgcagcctctggattcaccttcagtaggtacgacatgcactgggtccgccaaggtacaggaaaaggtctggagtgggtctcagctattggtacttctggtgacacatactatccagactccgtgaagggccgattcaccatctccagagaaaatgccaagaactccttgtatcttcaaatgaacagcctgagagccggggacacggctgtgtattactgtgcaagagggggtctccaaactacgacttggctttttgactactggggccagggaaccctggtcaccgtctcctcag

SEQ ID NO: 894 - DNA, 325 bp, Artificial Sequence
  Synthetic
gacatccagatgacccagtctccatcctccctgtctgcatctgtaggagacagagtcaccatcacttgccgggcaagtcagagcattagcaggtatttaaactggtatcagcagaaaccagggaaagcccctaagctcctgatctatgctgcatccagtttgcaaagtggggtcccatcaaggttcagtggcagcggagctgggacagatttcactctcaccatcagcagtctgcaacctgaagattttgcaatttactactgtcaacagagttacagtaaccctccgatcaccttcggccaagggacacgactggagattaaac

SEQ ID NO: 895 - DNA, 361 bp, Artificial Sequence
  Synthetic
gaggtgcagctggtggagtctgggggaggcttggtacagcctggggggtccctgagactctcctgtgcagcctctggattcaccttcagtaactacgacatgcactgggtccgccaaactacaggaaaaggtctggagtgggtctcagctattggtactgctggtgacacatactatccaggctccgtgaagggccgattcaccatgtccagagaaaatgccaagaactccttgtatcttcaaatgaacagcctgagagccggggacacggctgtgtattactgtgcaagagggggtctccaaactacgacttggctttttgacaactggggccagggaaccctggtcaccgtctcctcag

SEQ ID NO: 896 - DNA, 325 bp, Artificial Sequence
  Synthetic
gacatccagatgacccagtctccatcctccctgtctgcatctgtaggagacagagtcaccatcacttgccgggcaagtcagaccattagcaggtatttaaattggtatcaacagaaaccagggaaagcccctaagctcctgatctatgctgcatccagtctccaaagtggggtcccatcaaggttcagtggcagtggatctgggacagatttcactctcaccatcagcagtctgcaacctgaagattttgcaacttactactgtcaacagagttacactatgcctccgatcaccttcggccaagggacacgactggagattaaac

SEQ ID NO: 897 - DNA, 361 bp, Artificial Sequence
  Synthetic
gaggtgcagctggtgcagtctggagcagaggtgaaaaagcccggggagtctctgaagatctcctgtaagggctatggaaacagctttaacaactactggatcgcctgggtgcgccagatgcccgtgaaaggcctggagtggatgggggtcatcaatcctggtgactctgataccagatacagcccgtccttccaaggccaggtcaccatatcagtcgacaagtccatcagtaccgcctacctgcagtggagcagcctgaaggcctcggacaccgccatgtattactgtgcgagaacatggtcaccagctgctgtggcgttctttgactcttggggccagggaaccctggtcaccgtctcct

SEQ ID NO: 898 - DNA, 331 bp, Artificial Sequence
  Synthetic
aattttatgctgactcagccccactctgtgtcggagtctccggggaagacggtaaccatctcctgcacccgcagcagtgacagcattggcagcaactatgtacagtggtaccagcaacgcccgggcagttcccccaccattgtgatctatgaggatagccaaagaccctctggggtccctcatcggttctctggctccttcgacagctcctccaactctgcctccctcaccatctctggactgaagactgaggacgaggctgactactactgtcagtcttgggatagcggcaatctggtattcggcggagggaccaagctgaccgtcctag

SEQ ID NO: 899 - DNA, 364 bp, Artificial Sequence
  Synthetic
gaggtgcagctggtggagtctggaggaggcttgatccagcctggggggtccctgagactctcctgtgcagcctctggattcaccgtcagtcgcaactacatgagctgggtccgccaggctccagggaaggggctggagtgggtctcagttatttatagcggtggtagcacattctacgcagactccgtgaagggccgattcaccatctccagagacaattccaagaacacgctgtatcttcaaatgaacagcctgagagccgaggacacggccgtgtattactgtgcgagaggcctcccgactggggaaggttggaactactttgactactggggccagggaaccctggtcaccgtctcctcag

SEQ ID NO: 900 - DNA, 328 bp, Artificial Sequence
  Synthetic
cagtctgccctgactcagcctgcctccgtgtctgggtctcctggacagtcgatcaccatctcctgcactggaaccagcagtgacattggtggttatcactatgtctcctggtaccaacagcacccaggcaaagcccccaaactcatgatttatgatgtcagtaatcggccctcagggatttctaatcgcttctctggctccaagtctggcaacacggcctccctgaccatctctgggctccaggctgaggacgaggctgattattactgcagctcatatgcaagcagcagcgtgatattcggcggagggaccaagctgaccgtcctag

SEQ ID NO: 901 - DNA, 364 bp, Artificial Sequence
  Synthetic
gaagtgcagctggtggagtctggggggggcttggtacagcctggcaggtccctgagactctcctgtgcagcctctggattcatgtttgatgattatgccatgcactgggtccggcaagctccagggaagggcctggagtgggtctcaggtattaattggagtagtgctgacattggctatgtggactctgtgaagggccgattcaccatctccagagacaacgccaagaactccctgtatctgcaaatgaacagtctgagaactgaggacacggccttctattactgtgcaaaagggtggttcggagaattattgggcggaagtgactcctggggccagggaaccctggtcaccgtctcctcag

SEQ ID NO: 902 - DNA, 334 bp, Artificial Sequence
  Synthetic
cagcttgtgctgactcaatcatcctctgcctctgcttccctgggatcctcggtcaagctcacctgcactctgaacagtgggcacagtagctacatcatcgcatggcatcagcagcagccagggaaggcccctcggtacttgatgaagcttgaaggtagtggaagctacaacaaggggagcggagttcctgatcgcttctcaggctccagctctggggctgaccgctacctcaccatctccaacctccagtttgaggatgaggctgattattactgtgcgacctgggacagtaacactcaggtattcggcggagggaccaagctgaccgtcctag

SEQ ID NO: 903 - DNA, 367 bp, Artificial Sequence
  Synthetic
caggtgcagctggtgcagtctggggctgaggtgaagaagcctggggcctcagtgaaggtttcctgcaaggcatctagagacaccttcaccacccactatatacactgggtgcgacaggcccctggacaagggcttgagtggatgggaataatcaaccctagtggtggtagcataagctacgcacagaagttccagggcagagtcaccatgaccagggacacgtccacgagcacagtctacatggagctgagcagcctgcgatctgaggacacggccgtctattactgtgcgagaggggggatagtaccacatctgagtaactggttcgacccctggggccagggaaccctggtcaccgtctcctcag

SEQ ID NO: 904 - DNA, 328 bp, Artificial Sequence
  Synthetic
gaaattgtgttgacgcagtctccaggcaccctgtctttgtctccaggggaaagagccaccctctcctgtagggccagtcagagtgttagcagcagctacttagcctggtaccagcagaaacctggccaggctcccaggctcctcatctatggtgcatccagcagggccactggcatcccagacaggttcactggcagtgggtctgggacagacttcactctcaccatcagcagactggagcctgaagattttgcagtgtattactgtcagcaatatggtcgctcctcgggattcactttcggccctgggaccaaagtggatatcaaac

SEQ ID NO: 905 - DNA, 367 bp, Artificial Sequence
  Synthetic
caggtgcagctggtggagtctgggggaggcgtggtccagcctgggaggtccctgagactctcctgtgcagcctctggattcaccttcagtacctttgctatgcactgggtccgccaggctccaggcaaggggctagagtgggtggcagttacatcatatgatggaagtaataaatactacgcagactccgtgaagggccgattcaccatctccagagacaattccaagaacacgctgtatctgcaaatgaacagcctgagagctgaggacacggctgtgtattactgtgcgagaggcctactatggttcggggagtctgaatacttccagcactggggccagggcaccctggtcaccgtctcctcag

SEQ ID NO: 906 - DNA, 340 bp, Artificial Sequence
  Synthetic
gacatcgtgatgacccagtctccagactccctggctgtgtctctcggcgagagggccaccatcaactgcaagtccagccagagtgttttattcagctccaccaataagaactacttagcttggtaccagcagaaaccaggacagcctcctaagctgctcatttactgggcagctacccgggaatccggggtccctgaccgattcagtggcagcgggtctgggacagacttcacactcaccatcagcagcctgcaggctgaagatgtggcagtttatcactgtcagcaatactatagtacccctttcactttcggccctgggaccaaagtggatatcaaac

SEQ ID NO: 907 - DNA, 364 bp, Artificial Sequence
  Synthetic
caggtgcagctggtggagtctgggggaggcgtggtccagcctgggaggtccctgagactctcctgtgcagcctctggattcaccttcagtagctattctatccactgggtccgccaggctccaggcaaggggcttgagtgggtggcagttatatcagatgatgcaagtatgaaattctacgcagactccgtgaagggccgattcaccatctccagagacaattccaagaacacactgtttctgcagatgaacagcctgagtcctgaggacacggctgtatattactgtgcgagagatgcgctgactgcaatatcggttcgttttgactactggggccagggaaccctggtcaccgtctcctcag

SEQ ID NO: 908 - DNA, 325 bp, Artificial Sequence
  Synthetic
gacatccagatgacccagtctccatcctccctgtctgcttctgtaggagacagagtcaccatcacttgccgggcaagtcagagcattagtaggtatttaaattggtatcagcagaaaccagggaaagcccctaagctcctgatctatgatgcatccagtttccaaagtggggtcccatcaaggttcagtggcagtggatctgggacagatttcactctcaccatcagcagtctgcagcctgaagattttgcaacttactactgtcaacagagttacagtaccccttcggtcactttcggcggagggaccaaggtggagatcaaac

SEQ ID NO: 909 - protein, 121 aa, Artificial Sequence
  Synthetic
QVQLVESGGGVVQPGRTLRLSCAASGFIFSDYGMHWVRQAPGKGLEWVAVIWYDGSNKYYADSVKGRFTISRDNSKNTLSLQMSSLRAEDTAVYYCARLATIPYFYYMDVWGKGTTVTVSS

SEQ ID NO: 910 - protein, 14 aa, Artificial Sequence
  Synthetic
ARLATIPYFYYMDV

SEQ ID NO: 911 - protein, 108 aa, Artificial Sequence
  Synthetic
EIVMTQSPATLSVSPGERATLSCRASQSVSNKLAWYQQKPGQAPRLLIYGASTRATDIPARFSGSGSGTEFTLTISSLQSEDFAVYYCQQYSNWPPLTFGGGTKVEIK

SEQ ID NO: 912 - protein, 10 aa, Artificial Sequence
  Synthetic
QQYSNWPPLT

SEQ ID NO: 913 - protein, 124 aa, Artificial Sequence
  Synthetic
QVQLVQSGADVKKPGASVKVSCKASGYTFTSYGISWVRQAPGQGLEWMGWISTFDGNTNYAQKFQDRVTVTTDTSTSTAYMELKSLRSDDTAVYYCARTGTYYYDSSGYYFDYWGQGTLVTVSS

SEQ ID NO: 914 - protein, 17 aa, Artificial Sequence
  Synthetic
ARTGTYYYDSSGYYFDY

SEQ ID NO: 915 - protein, 109 aa, Artificial Sequence
  Synthetic
EIVMTQSPATLSVSPGERATLSCRASQSVSSHLAWYQQKPGQAPRPLIYGASIRATGIPARFSGSGSGTEFTLTISSLQSEDFAVYYCQQYDNWPPTWTFGQGTKVEVK

SEQ ID NO: 916 - protein, 11 aa, Artificial Sequence
  Synthetic
QQYDNWPPTWT

SEQ ID NO: 917 - protein, 126 aa, Artificial Sequence
  Synthetic
EVQLVQSGAEVKKPGESLKISCKGSGYSFTTYCIGWVRQMPGKGLEWMGIIYPGDSDTRYSPSFQGQVTISADKSISTAYLQWSSLKASDTAMYYCARHWYYGDYGNYSYYYLDVWGKGTTVTVSS

SEQ ID NO: 918 - protein, 19 aa, Artificial Sequence
  Synthetic
ARHWYYGDYGNYSYYYLDV

SEQ ID NO: 919 - protein, 107 aa, Artificial Sequence
  Synthetic
EIVMTQSPATLSVSPGERATLSCRASQSVSSNLAWYQQKPGQAPRLLIYGASTRATGIPARFSGSGSGTEFTLTISSLQSEDFAVYYCQQYNNWPLTFGGGTKVEIK

SEQ ID NO: 920 - protein, 9 aa, Artificial Sequence
  Synthetic
QQYNNWPLT

SEQ ID NO: 921 - protein, 128 aa, Artificial Sequence
  Synthetic
EVQLVQSGAEVKKPGESLKISCKGSGYSFSSYCIGWVRQMPGKGLEWMGIIYPGDSDTRYSPSFQGQVTISVDKSISTAYLQWSSLKASDTAMYYCARQWRGYYDRSGYYHFDAFDIWGQGTMVTVSS

SEQ ID NO: 922 - protein, 21 aa, Artificial Sequence
  Synthetic
ARQWRGYYDRSGYYHFDAFDI

SEQ ID NO: 923 - protein, 107 aa, Artificial Sequence
  Synthetic
EIVMTQSPATLSVSPGERATLSCRASQSVSSNLAWYQQKSGQAPRLLIYGASTRATGIPARFSGSGSGTEFTLTISSLQSEDFAVYYCQQYNNWLGTFGQGTKVEFK

SEQ ID NO: 924 - protein, 9 aa, Artificial Sequence
  Synthetic
QQYNNWLGT

SEQ ID NO: 925 - protein, 126 aa, Artificial Sequence
  Synthetic
EVQLVESGGGLVQPGGSLRLSCAASGFTLSSHDMHWVRQVPGKRLEWVSAIGPSGDTYYPDSVKGRFTISRENAKNSLYLQMNSLRAGDTAVYYCARGNYFDSSGFRNYYYGMDVWGQGTTVTVSS

SEQ ID NO: 926 - protein, 20 aa, Artificial Sequence
  Synthetic
ARGNYFDSSGFRNYYYGMDV

SEQ ID NO: 927 - protein, 108 aa, Artificial Sequence
  Synthetic
EIVMTQSPATLSVSPGERATLSCRASQSVSSNLAWYQQKPGQAPRVLIYGASTRATGIPARFSGSGSGTEFTLTISSLQSEDFAVYYCQQYHNWPPLTFGGGTKVEIK

SEQ ID NO: 928 - protein, 10 aa, Artificial Sequence
  Synthetic
QQYHNWPPLT

SEQ ID NO: 929 - protein, 122 aa, Artificial Sequence
  Synthetic
QLQLQESGPGLVKPSETLSLTCTVSGGSISGSDYYWGWIRQPPGKGLEWIGSFYDSGITYYNPSLKSRVTISVDTSQNQFSLRLTSVTAADTAIYYCASPYYDISSGMGGPWGQGTLVTVSS

SEQ ID NO: 930 - protein, 14 aa, Artificial Sequence
  Synthetic
ASPYYDISSGMGGP

SEQ ID NO: 931 - protein, 107 aa, Artificial Sequence
  Synthetic
EIVMTQSPATLSVSPGERATLSCRASQSVSSNLAWYQQKPGQAPRILIYYASTRATGIPARFSGSGSGTEFTLTISSLQSEDFAVYYCQQYNNWPLTFGPGTKVDIK

SEQ ID NO: 932 - protein, 9 aa, Artificial Sequence
  Synthetic
QQYNNWPLT

SEQ ID NO: 933 - protein, 123 aa, Artificial Sequence
  Synthetic
EVQLVESGGGLVQPGRSLRLSCAASGFTLDDFAMHWVRQAPGKGLEWVSGISWNSGTIDYADSVKGRFTISRDNAKNSLYLQMNSLRPEDTAFYYCAKVLNRNSFFYGSFDYWGQGTLVTVSS

SEQ ID NO: 934 - protein, 16 aa, Artificial Sequence
  Synthetic
AKVLNRNSFFYGSFDY

SEQ ID NO: 935 - protein, 109 aa, Artificial Sequence
  Synthetic
EIVMTQSPATLSVSPGESVTLSCRASQSVSSNLAWYQQKPGQAPRLLIYGASTRATGVPARFSGSGSGTEFTLTISSLQSEDFAVYYCQHYNNWPPGITFGQGTRLEIK

SEQ ID NO: 936 - protein, 11 aa, Artificial Sequence
  Synthetic
QHYNNWPPGIT

SEQ ID NO: 937 - protein, 122 aa, Artificial Sequence
  Synthetic
QVQLVQSGAEVRKPGASVKVSCKASGYIFTNYYLHWVRLAPGQGLEWMGVTSPSSGYTKYAQRFQGRVTMTRDTSTSTVYMDLSSLRSDDTAVYYCAREEADGSSFNWFDSWGQGTLVTVSS

SEQ ID NO: 938 - protein, 15 aa, Artificial Sequence
  Synthetic
AREEADGSSFNWFDS

SEQ ID NO: 939 - protein, 106 aa, Artificial Sequence
  Synthetic
EIVMTQSPVSLSVSPGERATLSCRASQSVSSNLAWYQQKPGQAPRLLIYGASTRATGIPARFSGSGSGTEFTLTISSLQSEDFAVYYCQQYKNWYTFGQGTNLEIK

SEQ ID NO: 940 - protein, 8 aa, Artificial Sequence
  Synthetic
QQYKNWYT

SEQ ID NO: 941 - protein, 120 aa, Artificial Sequence
  Synthetic
QVQLQQWGTGLLRPSETLSLTCAVYGDTLSGSFWTWIRQPPGKRLEWIGEISHGGSANYNPSLQSRFTISRDISKNQFSLKLTSVTAADTAVYYCVRGLPIKSVVWFDPWGQGTQVIVSS

SEQ ID NO: 942 - protein, 14 aa, Artificial Sequence
  Synthetic
VRGLPIKSVVWFDP

SEQ ID NO: 943 - protein, 105 aa, Artificial Sequence
  Synthetic
EIVLTQSPATLSVSPGERATLSCRASQSISTYLAWYQHKPGQAPRLLIYGASNRATGIPARFSGSGSGTDFALTISSLEPEDSAIYYCQQRSVWLTFGGGTKVEI

SEQ ID NO: 944 - protein, 8 aa, Artificial Sequence
  Synthetic
QQRSVWLT

SEQ ID NO: 945 - protein, 126 aa, Artificial Sequence
  Synthetic
EVQLVESGGGLAQPGRSLRLSCAASGFTFDDYAMHWVRQAPGKGLEWVSGINWNSGSLGYADSVKGRFTISRGIAKNSLYLQMNSLRPEDTAFYYCAKAGVRGIAAAGPDLNFDYWGQGTLVTVSS

SEQ ID NO: 946 - protein, 19 aa, Artificial Sequence
  Synthetic
AKAGVRGIAAAGPDLNFDY

SEQ ID NO: 947 - protein, 103 aa, Artificial Sequence
  Synthetic
EIVLTQSPATLSLSPGERATLSCRASQSVSSYLAWYQQKPGQAPRLLIYDASNRATGIPARFIGSGSGTDFTLTISSLEPEDFAVYYCQQRITFGQGTRLEIK

SEQ ID NO: 948 - protein, 5 aa, Artificial Sequence
  Synthetic
QQRIT

SEQ ID NO: 949 - protein, 132 aa, Artificial Sequence
  Synthetic
EVQLVESGGGLVKPGGSLRLSCAASGFSFSDAWMSWVRQAPGKGLEWVGLIKSKTDGGTTDYAAPVNGRFTISRDDSKNSLYLQMNSLKTEDTALYYCTTGHYDIFLGPTIFRHYYYGMEVWGQGTTVTVSS

SEQ ID NO: 950 - protein, 23 aa, Artificial Sequence
  Synthetic
TTGHYDIFLGPTIFRHYYYGMEV

SEQ ID NO: 951 - protein, 108 aa, Artificial Sequence
  Synthetic
EIVLTQSPATLSLSPGERATLSCRASQSIRSSLAWYQHKPGQAPRLLIYDASNRATGIPARFSGSGSGTDFTLTISSLEPEDFAVYYCQQRSNWPPWTFGQGTKVEIK

SEQ ID NO: 952 - protein, 10 aa, Artificial Sequence
  Synthetic
QQRSNWPPWT

SEQ ID NO: 953 - protein, 121 aa, Artificial Sequence
  Synthetic
QVQLVQSGAEVKKPGSSVKVSCKASGGTFSSYAISWVRQAPGQGLEWMGRSIPMLGVTTSAQKFKGRVTITADHSTSTVFMDLSSLRSDDTAIYYCARGVVGATPGSFDLWGQGTMVTVSS

SEQ ID NO: 954 - protein, 14 aa, Artificial Sequence
  Synthetic
ARGVVGATPGSFDL

SEQ ID NO: 955 - protein, 103 aa, Artificial Sequence
  Synthetic
EIVLTQSPATLSLSPGERATLSCRASQSVSNYLAWYQQKPGQAPRLLIYDASNRATGIPARFSGSGSGTDFTLTISSLEPEDFAVYYCQQRITFGQGTRLEIK

SEQ ID NO: 956 - protein, 5 aa, Artificial Sequence
  Synthetic
QQRIT

SEQ ID NO: 957 - protein, 124 aa, Artificial Sequence
  Synthetic
  misc_feature (116)..(116): Xaa can be any naturally occurring amino acid
QVQLQESGPGLVKPSQTLSLTCTVSGGSISSGGYYWSWIRQHPGKGLEWIGYIYYSGSTYYNPSLESRVTISVDTSKNQFSLKLSSVTAADTAVYYCASGELSAFGELFPHDYWGXGTLVTVSS

SEQ ID NO: 958 - protein, 16 aa, Artificial Sequence
  Synthetic
ASGELSAFGELFPHDY

SEQ ID NO: 959 - protein, 107 aa, Artificial Sequence; identical to SEQ ID NO: 42
  Synthetic

SEQ ID NO: 960 - protein, 9 aa, Artificial Sequence
  Synthetic
QQRSNWLFT

SEQ ID NO: 961 - protein, 138 aa, Artificial Sequence
  Synthetic
QVQLVQSGAEVKKPGSSVKVSCKASGGTFSSYAISWVRQAPGQGLEWMGGIIPIFGTANYAQKFQGRVTITADESTSTAYMELSSLRSEDTAVYYCARGNRLLYCSSTSCYLDAVRQGYYYYYYMDVWGKGTTVTVSS

SEQ ID NO: 962 - protein, 31 aa, Artificial Sequence
  Synthetic
ARGNRLLYCSSTSCYLDAVRQGYYYYYYMDV

SEQ ID NO: 963 - protein, 107 aa, Artificial Sequence
  Synthetic
EIVLTQSPATLSLSPGERATLSCRASQSVSSYLAWYQQKPGQAPRLLIYDASNRATGIPARFSGSGSGTDFTLTISSLEPEDFAVYYCQQRSNWPLTFGGGTKVEIK

SEQ ID NO: 964 - protein, 9 aa, Artificial Sequence
  Synthetic
QQRSNWPLT

SEQ ID NO: 965 - protein, 126 aa, Artificial Sequence
  Synthetic
EVQLVESGGGLVQPGRSLRLSCAASGFTFDDYAMHWVRQAPGKGLEWVSGISWNSGTIGYADSVKGRFTISRDNAKNSLYLQMNSLRAEDTAFYYCAKAGVRGIAAAGPDLNFDHWGQGTLVTVSS

SEQ ID NO: 966 - protein, 19 aa, Artificial Sequence
  Synthetic
AKAGVRGIAAAGPDLNFDH

SEQ ID NO: 967 - protein, 103 aa, Artificial Sequence
  Synthetic
EIVLTQSPATLSLSPGERATLSCRASQSVSSYLAWYQQKPGQAPRLLIYDASNRATGIPARFSGSGSGTDFTLTISSLEPEDFAVYYCQQRITFGQGTRLEIK

SEQ ID NO: 968 - protein, 5 aa, Artificial Sequence
  Synthetic
QQRIT

SEQ ID NO: 969 - protein, 126 aa, Artificial Sequence
  Synthetic
EVQLVESGGGLVQPGRSLRLSCAASGFTFDDYAMHWVRQAPGKGLEWVSGISWNSGSIGYADSVKGRFTISRDNAKNSLYLQMNSLRAEDTALYYCAKAGVRGIAAAGPDLNFDYWGQGTLVTVSS

SEQ ID NO: 970 - protein, 19 aa, Artificial Sequence
  Synthetic
AKAGVRGIAAAGPDLNFDY

SEQ ID NO: 971 - protein, 103 aa, Artificial Sequence; identical to SEQ ID NO: 967
  Synthetic

SEQ ID NO: 972 - protein, 5 aa, Artificial Sequence
  Synthetic
QQRIT

SEQ ID NO: 973 - protein, 126 aa, Artificial Sequence
  Synthetic
QVQLVESGGGVVQPGRSLRLSCAASGFTFSSFAMHWVRQAPGKGLEWVAVISYDGSNKYYADSVQGRFTISRDNSKNTLSLQMNSLRAEDTAVYYCAKQLVSGGYGDLWFGGLDYWGQGTLVTVSS

SEQ ID NO: 974 - protein, 19 aa, Artificial Sequence
  Synthetic
AKQLVSGGYGDLWFGGLDY

SEQ ID NO: 975 - protein, 107 aa, Artificial Sequence
  Synthetic
EIVLTQSPATLSLSPGERATLSCRASQSVSSFLAWYQQKPGQAPRLLIHDASDRATGIPARFSGSGSGTDFTLTISSLEPEDFAVYYCQQRSNWPQTFGQGTKVEIK

SEQ ID NO: 976 - protein, 9 aa, Artificial Sequence
  Synthetic
QQRSNWPQT

SEQ ID NO: 977 - protein, 126 aa, Artificial Sequence; identical to SEQ ID NO: 3
  Synthetic

SEQ ID NO: 978 - protein, 19 aa, Artificial Sequence
  Synthetic
AKAGVRNIAAAGPDLNFDF

SEQ ID NO: 979 - protein, 103 aa, Artificial Sequence; identical to SEQ ID NO: 4
  Synthetic

SEQ ID NO: 980 - protein, 5 aa, Artificial Sequence
  Synthetic
QQRIT

SEQ ID NO: 981 - protein, 124 aa, Artificial Sequence; identical to SEQ ID NO: 17
  Synthetic

SEQ ID NO: 982 - protein, 16 aa, Artificial Sequence
  Synthetic
ATGGLSAFGELFPHDK

SEQ ID NO: 983 - protein, 107 aa, Artificial Sequence
  Synthetic
EIVLTQSPATLSLSPGERATLSCRASQSVGSDLAWYQQKPGQAPRLLIYDTSNRATGIPARFSGSGSGTDFTLTISSLDPADFAVYYCQQRTNWLFSFGPGTRVDMK

SEQ ID NO: 984 - protein, 9 aa, Artificial Sequence
  Synthetic
QQRTNWLFS

SEQ ID NO: 985 - protein, 127 aa, Artificial Sequence
  Synthetic
QVQLVQSGAEVKKPGSSVKVSCKTSGGTFSNNAINWVRQAPGQGLEWMGGIIPSFGTSTYAQRFQGRITITADESTATAYMDLSGLTSEDTAVYYCAREGDCDGDCYSGSYWYFEFWGRGTLVTISS

SEQ ID NO: 986 - protein, 20 aa, Artificial Sequence
  Synthetic
AREGDCDGDCYSGSYWYFEF

SEQ ID NO: 987 - protein, 106 aa, Artificial Sequence
  Synthetic
EIVLTQSPATLSLSPGERATLSCRASQSVSSLIAWYQQKPGQAPRLLIYNSFKRAAGVPARFSGSGSGTDFTLTISSLEPEDFAVYYCQQRSNWLTFGGGTKVEIK

SEQ ID NO: 988 - protein, 8 aa, Artificial Sequence
  Synthetic
QQRSNWLT

SEQ ID NO: 989 - protein, 127 aa, Artificial Sequence
  Synthetic
QVQLVESGGGVVQPGRSLRLSCATSGFTFSSYGLHWVRQAPGKGLEWVALISYDGSDKYYADSVKGRFTISRDTSKNTLFLQMNSLRAEDTAVYYCAKVMGPYCSGGSCYSGYFDYWGQGTLVTVSS

SEQ ID NO: 990 - protein, 20 aa, Artificial Sequence
  Synthetic
AKVMGPYCSGGSCYSGYFDY

SEQ ID NO: 991 - protein, 107 aa, Artificial Sequence; identical to SEQ ID NO: 963
  Synthetic

SEQ ID NO: 992 - protein, 9 aa, Artificial Sequence
  Synthetic
QQRSNWPLT

SEQ ID NO: 993 - protein, 126 aa, Artificial Sequence
  Synthetic
EVQLVESGGRLVQPGRSLRLSCAASGFTFDDYAMHWVRQAPGKGLEWVSGINWISGSVGYADSVKGRFTISRGNAKNSLYLQMNSLRTEDTAFYYCAKAGVRNIAAAGPDLNFDSWGQGTLVTVSS

SEQ ID NO: 994 - protein, 19 aa, Artificial Sequence
  Synthetic
AKAGVRNIAAAGPDLNFDS

SEQ ID NO: 995 - protein, 103 aa, Artificial Sequence
  Synthetic
  misc_feature (12)..(12): Xaa can be any naturally occurring amino acid
  misc_feature (31)..(31): Xaa can be any naturally occurring amino acid
  misc_feature (48)..(48): Xaa can be any naturally occurring amino acid
  misc_feature (67)..(67): Xaa can be any naturally occurring amino acid
EIVLTQSPATLXLSPGERATLSCRASQSIGXYLAWYQQKPGQAPRLLXYDASNRAPGVPARFSGSGXGTDFTLTITRLEPEDFAVYYCQQRITFGQGTRLEVK

SEQ ID NO: 996 - protein, 5 aa, Artificial Sequence
  Synthetic
QQRIT

SEQ ID NO: 997 - protein, 133 aa, Artificial Sequence
  Synthetic
EVQLVESGGGLVQPGRSLRLSCVVSGFTLENYAMHWVRQAPGKGLEWVSGISWNSGTKGYADSVKGRFTISRDNAKNSLYLQMNSLRAEDTALYYCAKDNAPKNDYDFWTDNFGKHYYYGMDVWGQGTTVTVS

SEQ ID NO: 998 - protein, 27 aa, Artificial Sequence
  Synthetic
AKDNAPKNDYDFWTDNFGKHYYYGMDV

SEQ ID NO: 999 - protein, 108 aa, Artificial Sequence
  Synthetic
EIVLTQSPVSLSLSPGERATLSCRASQSVGSYLAWYQHKPGQAPRLLIYDALNRATGIPARFSGSGSGTDFTLTISSLEPEDFAVYYCQQRSNWPQLTFGGGTKVEIK

SEQ ID NO: 1000 - protein, 10 aa, Artificial Sequence
  Synthetic
QQRSNWPQLT

SEQ ID NO: 1001 - protein, 118 aa, Artificial Sequence
  Synthetic
EVQLVESGGGLIQPGGSLRLSCAASGITVSSNYMSWVRQAPGKGLEWVSVMYAGGSTFYADSVKGRFTISRDDSKNTLFLQMNSLRAEDTAIYYCARDLYSSGGTDIWGQGTMVTVSS

SEQ ID NO: 1002 - protein, 12 aa, Artificial Sequence
  Synthetic
ARDLYSSGGTDI

SEQ ID NO: 1003 - protein, 108 aa, Artificial Sequence
  Synthetic
EIVLTQSPGTLSLSPGERATLSCRASQSIGSSYLAWYQQKPGLAPRLLIYGASRRATGIPDKFSGSGSGADFTLTISRLEPEDFAVYYCQQYGSSPGTFGQGTKVEIK

SEQ ID NO: 1004 - protein, 9 aa, Artificial Sequence
  Synthetic
QQYGSSPGT

SEQ ID NO: 1005 - protein, 122 aa, Artificial Sequence
  Synthetic
QVQLVQSGAEVKKPGASVRVSCKASGYTFTNFYIHWVRQAPGQGLEWMGIINPDAGSITYAQKFRGRVTMASDTSTSTVYMELSRLRSEDTAVYFCARGWIPPAAASAFDPWGQGTLVTVSS

SEQ ID NO: 1006 - protein, 15 aa, Artificial Sequence
  Synthetic
ARGWIPPAAASAFDP

SEQ ID NO: 1007 - protein, 107 aa, Artificial Sequence
  Synthetic
  misc_feature (18)..(18): Xaa can be any naturally occurring amino acid
EIVLTQSPGTLSLSPGEXASLSCRASQSISFKYLAWYQQRPGQAPRLLIDGASTRATGIPDRFSGSGSGTDFTLTISSLEPEDFAVYYCQQYGRSFTFGPGTKVDMK

SEQ ID NO: 1008 - protein, 8 aa, Artificial Sequence
  Synthetic
QQYGRSFT

SEQ ID NO: 1009 - protein, 128 aa, Artificial Sequence
  Synthetic
QVQLQESGPGLVKPSETLSLICSVSGVSVSSRNFFWSWIRQPPGKGLEWIGYMSYGGNTNYNPSLKSRVTISIDTSKNQFSLKLSSVTAADTAVYYCARETYYYDRSGYYSSDGFDYWGQGILVIVSS

SEQ ID NO: 1010 - protein, 20 aa, Artificial Sequence
  Synthetic
ARETYYYDRSGYYSSDGFDY

SEQ ID NO: 1011 - protein, 108 aa, Artificial Sequence; identical to SEQ ID NO: 28
  Synthetic

SEQ ID NO: 1012 - protein, 9 aa, Artificial Sequence
  Synthetic
QQYGNSPYT

SEQ ID NO: 1013 - protein, 123 aa, Artificial Sequence
  Synthetic
QVQLQESGPGLVKPSQTLSLTCTVSGGSISSGGYYWNWIRQHPGRGLEWIGYIFYSGSTYYNASLRSRVTISIDTSKNQFSLKLKSVTAADTAVYYCARDQGYSSSWDAFDIWGQGTMVTVSS

SEQ ID NO: 1014 - protein, 15 aa, Artificial Sequence
  Synthetic
ARDQGYSSSWDAFDI

SEQ ID NO: 1015 - protein, 107 aa, Artificial Sequence
  Synthetic
EIVLTQSPGTLSLSPGERATLSCRASQSISSSYVAWYQQKTGQAPRLLIYGASSRATGIPDRFSGSGSGTEFTLTISRLEPEDFAVYYCQQHGSSLTFGGGTKVEIK

SEQ ID NO: 1016 - protein, 8 aa, Artificial Sequence
  Synthetic
QQHGSSLT

SEQ ID NO: 1017 - protein, 123 aa, Artificial Sequence
  Synthetic
QMQLVQSGPEVKKPGTSVKVSCKAFQLSFSVSAVQWVRQARGQRLEWIGWIVVGSGNTNYAQKFQERVTITRDMSTSTVYMEVRSLRSEDTAVYYCAAPQCNRTTCYDAFDMWGQGTMVTVSS

SEQ ID NO: 1018 - protein, 16 aa, Artificial Sequence
  Synthetic
AAPQCNRTTCYDAFDM

SEQ ID NO: 1019 - protein, 108 aa, Artificial Sequence; identical to SEQ ID NO: 56
  Synthetic

SEQ ID NO: 1020 - protein, 9 aa, Artificial Sequence
  Synthetic
QQYGSSPWT

SEQ ID NO: 1021 - protein, 123 aa, Artificial Sequence
  Synthetic
QMQLVQSGPEVKKPGTSVKVSCKASGFTFTSSAVQWVRQARGQRLEWIGWIVVGSGNTNYAQKFQERVTITRDMSTSTAYMELSSLRSEDTAVYYCAAPHCSGGSCLDAFDIWGQGTMVTVSS

SEQ ID NO: 1022 - protein, 16 aa, Artificial Sequence
  Synthetic
AAPHCSGGSCLDAFDI

SEQ ID NO: 1023 - protein, 108 aa, Artificial Sequence
  Synthetic
EIVLTQSPGTLSLSPGERATLSCRASQSVRSSYLAWYQQKPGQAPRLLIYGASSRATGIPDRFSGSGSGTDFTLTISRLEPEDFAVYYCQQYGSSPWTFGQGTKVEIK

SEQ ID NO: 1024 - protein, 9 aa, Artificial Sequence
  Synthetic
QQYGSSPWT

SEQ ID NO: 1025 - protein, 117 aa, Artificial Sequence
  Synthetic
EVQLVESGGGLIQPGGSLRLSCAASGFTVSSNYMSWVRQAPGKGLEWVSVIYSGGSTYYADSVKGRFTISRDNSKNTLYLQMNSLRAGDTAVYYCARDYGDFYFDYWGQGTLVTVSS

SEQ ID NO: 1026 - protein, 11 aa, Artificial Sequence
  Synthetic
ARDYGDFYFDY

SEQ ID NO: 1027 - protein, 108 aa, Artificial Sequence
  Synthetic
EIVLTQSPGTLSLSPGERATLSCRASQSVSSTYLAWYQQKPGQAPRLLIYGASSRATGIPDRFSGSGSGTDFTLTISRLEPEDFAVYYCQQYGSSPRTFGQGTKLEIK

SEQ ID NO: 1028 - protein, 9 aa, Artificial Sequence
  Synthetic
QQYGSSPRT

SEQ ID NO: 1029 - protein, 117 aa, Artificial Sequence
  Synthetic
EVQLVESGGGLIQPGGSLRLSCAASGFTVSSNYMSWVRQAPGKGLEWVSVIYSGGSTFYADSVKGRFTISRDNSKNTLYLQMNSLRAEDTAVYYCARDWGDYYFDYWGQGTLVTVSS

SEQ ID NO: 1030 - protein, 11 aa, Artificial Sequence
  Synthetic
ARDWGDYYFDY

SEQ ID NO: 1031 - protein, 108 aa, Artificial Sequence
  Synthetic
EIVLTQSPGTLSLSPGERATLSCRASQSVSSSYLAWYQQKPGQAPRLLIYGASSRATGIPDRFSGSGSGTDFTLTISRLEPEDFAVYYCQQYGSSPRTFGQGTKVEIK

SEQ ID NO: 1032 - protein, 9 aa, Artificial Sequence
  Synthetic
QQYGSSPRT

SEQ ID NO: 1033 - protein, 125 aa, Artificial Sequence
  Synthetic
EVQLVESGGGLVQPGGSLRLSCAASGFTFSSYWMHWVRQAPGKGLVWVSRINSDGSSTSYADSVKGRFTISRDNAKNTLYLQMNSLRAEDTAVYYCARAWAMRQTTLTPEWIDYWGQGTLVTVSS

SEQ ID NO: 1034 - protein, 18 aa, Artificial Sequence
  Synthetic
ARAWAMRQTTLTPEWIDY

SEQ ID NO: 1035 - protein, 108 aa, Artificial Sequence
  Synthetic
EIVLTQSPGTLSLSPGERATLSCRASQSVSSSYLAWYQQKPGQAPRLLIYGASSRATGIPDRFSGSGSGTDFTLTISRLEPEDFAVYYCQQYGSSPYTFGQGTKLEIK

SEQ ID NO: 1036 - protein, 9 aa, Artificial Sequence
  Synthetic
QQYGSSPYT

SEQ ID NO: 1037 - protein, 122 aa, Artificial Sequence
  Synthetic
QVQLVESGGGVVQPGRSLRLACAASGFTFSSYGMHWVRRAPGKGLEWVAVIWHDGSNKYYADSVKGRFTISRDNSKSTLFLQMNSLRAEDTAVYYCARGDTSGWYALGLDVWGRGTTVTVSS

SEQ ID NO: 1038 - protein, 15 aa, Artificial Sequence
  Synthetic
ARGDTSGWYALGLDV

SEQ ID NO: 1039 - protein, 109 aa, Artificial Sequence
  Synthetic
EIVLTQSPGTLSLSPGERATLSCRASQSVSSSYLAWYQQKPGQAPRLLIYGASSRATGIPDRFSGSGSGTDFTLTISRLEPEDFAVYYCQQYGSSPPYTFGQGTKLEIK

SEQ ID NO: 1040 - protein, 10 aa, Artificial Sequence
  Synthetic
QQYGSSPPYT

SEQ ID NO: 1041 - protein, 118 aa, Artificial Sequence; identical to SEQ ID NO: 35
  Synthetic

SEQ ID NO: 1042 - protein, 12 aa, Artificial Sequence
  Synthetic
ARDLSSSGGFDY

SEQ ID NO: 1043 - protein, 107 aa, Artificial Sequence; identical to SEQ ID NO: 36
  Synthetic

SEQ ID NO: 1044 - protein, 8 aa, Artificial Sequence
  Synthetic
QQYGSLYT

SEQ ID NO: 1045 - protein, 120 aa, Artificial Sequence
  Synthetic
EVQLVESGGGLVKPGESLRISCAASGFTFGNVWMNWVRQAPGKGLEWVGRIKSKTAGGATDYGAPVKGRFIISRDDSQNTLYLQMNSLKTDDTAVYYCTTVAAGEPPVHWGQGTLITVSS

SEQ ID NO: 1046 - protein, 11 aa, Artificial Sequence
  Synthetic
TTVAAGEPPVH

SEQ ID NO: 1047 - protein, 109 aa, Artificial Sequence
  Synthetic
EIVLTQSPGTLSLSPGERATLSCRASQSVSGSSLAWYQQIPGQPPRLLISGASIRATGIPDRFSGSGSGTEFTLTISRLEPEDFAVYYCHHYGGSPPFTFGQGTKLEIK

SEQ ID NO: 1048 - protein, 10 aa, Artificial Sequence
  Synthetic
HHYGGSPPFT

SEQ ID NO: 1049 - protein, 123 aa, Artificial Sequence
  Synthetic
QMQLVQSGPEVKKPGTSVKVSCKASGFTFSSSAVQWVRQARGQRLEWIGWIVVGSGNTNYGREFQERVTITRDLSTSTAYMELGSLRSEDTAVYYCAAPHCNGNTCYDAFDMWGQGTMVTVSS

SEQ ID NO: 1050 - protein, 16 aa, Artificial Sequence
  Synthetic
AAPHCNGNTCYDAFDM

SEQ ID NO: 1051 - protein, 109 aa, Artificial Sequence
  Synthetic
EIVLTQSPGTLSLSPGERATLSCRASQSVRSGYLAWYQQKPGQAPRVLIYAASRRATGIPDRFSGSGSGTDFTLTISRLEPEDFAVYYCQQYDGSAWWTFGQGTKVEIK

SEQ ID NO: 1052 - protein, 10 aa, Artificial Sequence
  Synthetic
QQYDGSAWWT

SEQ ID NO: 1053 - protein, 126 aa, Artificial Sequence
  Synthetic
QVQLVESGGGVVQPGRSLRLSCAASGLIFRTYGMHWVRQAPGKGLEWVAVISIDGSNQYYADSVKGRFTISRDNSKNTLYLQMNSLGVEDTAVYFCAKGGLYYYGSGSYWYGLDVWGQGTTVTVSS

SEQ ID NO: 1054 - protein, 19 aa, Artificial Sequence
  Synthetic
AKGGLYYYGSGSYWYGLDV

SEQ ID NO: 1055 - protein, 108 aa, Artificial Sequence
  Synthetic
EIVLTQSPGTLSLSPGERATLSCRASQSVGSDYLAWYQQKLGQAPRLLIYGASSRATGIPDRFSGSGAGTDFTLTISGLEPEDFAVYYCQQYGSSPFTFGPGTKVDIK

SEQ ID NO: 1056 - protein, 9 aa, Artificial Sequence
  Synthetic
QQYGSSPFT

SEQ ID NO: 1057 - protein, 123 aa, Artificial Sequence; identical to SEQ ID NO: 53
  Synthetic

SEQ ID NO: 1058 - protein, 16 aa, Artificial Sequence
  Synthetic
VKESDYYMASVNGMDV

SEQ ID NO: 1059 - protein, 108 aa, Artificial Sequence; identical to SEQ ID NO: 54
  Synthetic

SEQ ID NO: 1060 - protein, 9 aa, Artificial Sequence
  Synthetic
QQYGTSPYT

SEQ ID NO: 1061 - protein, 129 aa, Artificial Sequence
  Synthetic
EVQLVESGGGLVQPGGSLRLSCAASGFIFRSFWMYWVRQAPGKGLVWVSRISSDGSRTAYADSVKGRFTISRDNTKDTLYLQMNSLRAEDTAVYYCARVPRDYYDRTGNHHVDEYFQHWGQGTLVSVSS

SEQ ID NO: 1062 - protein, 22 aa, Artificial Sequence
  Synthetic
ARVPRDYYDRTGNHHVDEYFQH

SEQ ID NO: 1063 - protein, 107 aa, Artificial Sequence
  Synthetic
EIVLTQSPGTLSLSPGERATLFCRASQSVTSSDLAWYQQKPGQAPRLLISGASSRATGIPDRFIGSGSGTDFTLTISGLAPEDFAVYYCQQYASSPYTFGQGTKLEI

SEQ ID NO: 1064 - protein, 9 aa, Artificial Sequence
  Synthetic
QQYASSPYT

SEQ ID NO: 1065 - protein, 123 aa, Artificial Sequence
  Synthetic
QMQLVQSGPEVKKPGTSVKVSCKASGFTFYNSAVQWVRQARGQRLEWVGWIVVGSGNTDYAQKFQERVTMTRDLSTNTAYMEVNSLRSEDTAVYYCAAPYCSGGTCLDGFDIWGQGTMVTVSS

SEQ ID NO: 1066 - protein, 16 aa, Artificial Sequence
  Synthetic
AAPYCSGGTCLDGFDI

SEQ ID NO: 1067 - protein, 108 aa, Artificial Sequence
  Synthetic
EIVLTQSPGTLSLSPGERGTLSCRASQSVRSNYLAWYKQRPGQAPRLLVYGASSRATGIPDRFSGSGSGTDFTLTISRLEPEDFAVYYCQQYGSSPWTFGQGTKVEIK

SEQ ID NO: 1068 - protein, 9 aa, Artificial Sequence
  Synthetic
QQYGSSPWT

SEQ ID NO: 1069 - protein, 122 aa, Artificial Sequence
  Synthetic
QVQLVQSGAEVKKPGSSVKVSCKASGATLTSYGISWVRQAPGQGLEWMGGIIPFHDIIYYAQKFQGRVTISADKSTSTSYMELSSLRSEDTAIYYCARWEGTGWLLYAFDIWGQGTVVTVSS

SEQ ID NO: 1070 - protein, 15 aa, Artificial Sequence
  Synthetic
ARWEGTGWLLYAFDI

SEQ ID NO: 1071 - protein, 112 aa, Artificial Sequence
  Synthetic
EIVLTQSPGTLSLSPGESAVFSCRASQSVRSNSLAWYQQKPGQAPRLLIYGASNRATGIPDRFSGSGSGTDFTLTINRLEPDDFALYYCQQYDSSSPGARFTFGPGTKVDIK

SEQ ID NO: 1072 - protein, 13 aa, Artificial Sequence
  Synthetic
QQYDSSSPGARFT

SEQ ID NO: 1073 - protein, 118 aa, Artificial Sequence
  Synthetic
EVQLVESGGGLIQPGGSLRLSCAASGFTVSSNYMSWVRQAPGKGLEWVSVIYSGGSTYYADSVKGRFTISRDNSKNTLYLQMNSLRAEDTAIYYCARDVLERGGMDVWGQGTTVIVSS

SEQ ID NO: 1074 - protein, 12 aa, Artificial Sequence
  Synthetic
ARDVLERGGMDV

SEQ ID NO: 1075 - protein, 108 aa, Artificial Sequence
  Synthetic
EIVLTQSPGTLSLSPGERATLSCRASQSVGSSFLAWYQQRPGQAPRLLIYGASSRATGIPDRFSGSGFGTDFTLTISRLEPEDSAVYYCQQFGSSPFTFGPGTRVEIK

SEQ ID NO: 1076 - protein, 9 aa, Artificial Sequence
  Synthetic
QQFGSSPFT

SEQ ID NO: 1077 - protein, 120 aa, Artificial Sequence
  Synthetic
EVQLVESGGGLVKPGGSLRLSCAASGFTFSNVWMSWVRQAPGKGLEWVGRIKSKIDGGTTEYAAPVKGRFIISRDDSKNTLSLQMNSLKTEDTAVYYCTTDHGREPPVHWGQGTLVTVSS

SEQ ID NO: 1078 - protein, 11 aa, Artificial Sequence
  Synthetic
TTDHGREPPVH

SEQ ID NO: 1079 - protein, 107 aa, Artificial Sequence
  Synthetic
EIVLTQSPGTLSLSPGERASLSCRARQSVYSNYLAWYQHKSGQAPRLLFYGASSRATDIPDRFSASGSGTDFTLTISRLEPEDFAVYYCLQYGPSPTFGPGTRLEIK

SEQ ID NO: 1080 - protein, 8 aa, Artificial Sequence
  Synthetic
LQYGPSPT

SEQ ID NO: 1081 - protein, 128 aa, Artificial Sequence
  Synthetic
QVQLQESGPGLAKPSETLSLTCSVSGGSVSSRNFYWSWIRQPPGKGLEWIGYIYYSGSPNYNPSLKSRVTMSVDMSKNQVSLKLTSVTAADTAVYYCARETFYYDRTGYYSSDGFDFWGQGILVTVSS

SEQ ID NO: 1082 - protein, 20 aa, Artificial Sequence
  Synthetic
ARETFYYDRTGYYSSDGFDF

SEQ ID NO: 1083 - protein, 108 aa, Artificial Sequence
  Synthetic
  misc_feature (17)..(17): Xaa can be any naturally occurring amino acid
EIVLTQSPGTLSLSPGXSATLSCRASQSVSSTSLAWYQQKPGQAPRLLIYGASSRATGTPDRFSGGGSGADFTLTISRLEPDDFAVYYCQQYGSSPYTFGQGTKLDIK

SEQ ID NO: 1084 - protein, 9 aa, Artificial Sequence
  Synthetic
QQYGSSPYT

SEQ ID NO: 1085 - protein, 129 aa, Artificial Sequence
  Synthetic
  misc_feature (13)..(14): Xaa can be any naturally occurring amino acid
QVQLVQSGAAVKXXGASVKVSCKAFGYTFTSYDIIWVRQATGQGLEWMGWMSPNNSNTGYAQKFQGRVTMTRDTSINTAYMELTSLRSEDTAVYYCARFGYYYVDSGPNRARYTGLDVWGQGTTVTVSS

SEQ ID NO: 1086 - protein, 22 aa, Artificial Sequence
  Synthetic
ARFGYYYVDSGPNRARYTGLDV

SEQ ID NO: 1087 - protein, 107 aa, Artificial Sequence
  Synthetic
EIVLTQSPGTLSLSPGERVTLSCRASQSVGANYLAWYQQKPGQAPRLLIYGTYNRATGIPDRFSGSGSGTDFTLTISRLEPEDFAVYYCQQYNRSPITFGQGTRLEI

SEQ ID NO: 1088 - protein, 9 aa, Artificial Sequence
  Synthetic
QQYNRSPIT

SEQ ID NO: 1089 - protein, 115 aa, Artificial Sequence
  Synthetic
EVQLVESGGGLIQPGGSLRLSCAASGLTVSRNYMNWVRQTPGERLECVSVMYSGGSKFYADSVKGRFTISRDSAKNTLYLQMNNLRIEDTAVYYCTRESYGMDVWGQGTTVTVSS

SEQ ID NO: 1090 - protein, 9 aa, Artificial Sequence
  Synthetic
TRESYGMDV

SEQ ID NO: 1091 - protein, 108 aa, Artificial Sequence
  Synthetic
EIVLTQSPVTLSLSPGERATLSCRASQSVGSNYLAWYQQKPGQAPRLLLYGTSSRATGIPDRFSGSGSGADYTLTINRLEPEDSAVYYCHQYGSSPGTFGQGTKVEIK

SEQ ID NO: 1092 - protein, 9 aa, Artificial Sequence
  Synthetic
HQYGSSPGT

SEQ ID NO: 1093 - protein, 118 aa, Artificial Sequence
  Synthetic
EVQLVESGGGLIQPGGSLRLSCAASGFTVSSNYMSWVRQAPGKGLEWVSVIYSGGSTYYADSVKGRFTISRDNSKNTLYLQMNSLRAEDTAVYYCARDLYSSGGTDIWGQGTMVTVSS

SEQ ID NO: 1094 - protein, 12 aa, Artificial Sequence
  Synthetic
ARDLYSSGGTDI

SEQ ID NO: 1095 - protein, 108 aa, Artificial Sequence
  Synthetic
EIVLTQSPVSLSLSPGERATLSCRASQSVSSSYLAWYQQKPGQAPRLLIYGASSRATGIPDRFSGSGSGTDFTLTISRLEPEDFAVYYCQQYGSSPGTFGQGTKVEIK

SEQ ID NO: 1096 - protein, 9 aa, Artificial Sequence
  Synthetic
QQYGSSPGT

SEQ ID NO: 1097 - protein, 127 aa, Artificial Sequence
  Synthetic
QVQLVESGGGVVQPGRSLRLSCAASGFTFSSYGMHWVRQAPGKGLEWVAVISYDGSNKYYADSVKGRFTISRDNSKNTLYLQMNSLRAEDTAVYYCAKAGGPYCSGGSCYSSYFDYWGQGTLVTVSS

SEQ ID NO: 1098 - protein, 20 aa, Artificial Sequence
  Synthetic
AKAGGPYCSGGSCYSSYFDY

SEQ ID NO: 1099 - protein, 109 aa, Artificial Sequence
  Synthetic
  misc_feature (9)..(10): Xaa can be any naturally occurring amino acid
EIVLTQSPXXLSLSPGERATLSCRASQSVSSRNLAWYQQKPGQAPRLLIDGASSRATGIPDRFSGSGSGTDFTLTISRLEPEDFAVYYCQQYGSSPAITFGQGTRLEIK

SEQ ID NO: 1100 - protein, 10 aa, Artificial Sequence
  Synthetic
QQYGSSPAIT

SEQ ID NO: 1101 - protein, 118 aa, Artificial Sequence
  Synthetic
EVQLVESGGGLIQPGGSLRLSCAASGLIVRSNYMTWVRQAPGKGLEWVSVIYSGGSTFYADSVKGRFTISRDISKNTLYLQMNSLRAEDTAVYYCARDLSSSGGFDSWGQGTLVTVSS

SEQ ID NO: 1102 - protein, 12 aa, Artificial Sequence
  Synthetic
ARDLSSSGGFDS

SEQ ID NO: 1103 - protein, 107 aa, Artificial Sequence
  Synthetic
  misc_feature (9)..(9): Xaa can be any naturally occurring amino acid
EIVLTQSPXSLSLSPGERATLSCRASQSISSSYLAWYQQTPGQAPRLLIYGTSNRATGIPDRFSGSGSGTDFTLTIRRLEPEDFAVYYCQQYGTLYTFGQGTKLEIK

SEQ ID NO: 1104 - protein, 8 aa, Artificial Sequence
  Synthetic
QQYGTLYT

SEQ ID NO: 1105 - protein, 123 aa, Artificial Sequence
  Synthetic
QMQLVQSGPEVKKPGTSVKVSCKASGFTFTSSAVQWVRQARGQRLEWIGWIVVGSGNTNYAQKFQERVTITRDMSTSTAYMELSSLRSEDTAVYYCAAPHCSGGSCYDAFDIWGQGTMVTVSS

SEQ ID NO: 1106 - protein, 16 aa, Artificial Sequence
  Synthetic
AAPHCSGGSCYDAFDI

SEQ ID NO: 1107 - protein, 108 aa, Artificial Sequence
  Synthetic
  misc_feature (9)..(9): Xaa can be any naturally occurring amino acid
EIVLTQSPXSLSLSPGERATLSCRASQSVSSSYLAWYQQKPGQAPRLLIYGASSRATGIPDRFSGSGSGTDFTLTISRLEPEDFAVYYCQQYGSSPWTFGQGTKVEIK

SEQ ID NO: 1108 - protein, 9 aa, Artificial Sequence
  Synthetic
QQYGSSPWT

SEQ ID NO: 1109 - protein, 127 aa, Artificial Sequence; identical to SEQ ID NO: 39
  Synthetic

SEQ ID NO: 1110 - protein, 20 aa, Artificial Sequence
  Synthetic
AKQIGEYCSGGSCYQGSLDY

SEQ ID NO: 1111 - protein, 107 aa, Artificial Sequence
  Synthetic
DIQMTQSPVSLSASVGDRVTITCQASQDISNYLHWYQQKPGKAPKLLIYDASNLETGVPSRFSGSGSGTDFTFTISSLQPEDIATYYCQQYDNLPFTFGPGTKVDAK

SEQ ID NO: 1112 - protein, 9 aa, Artificial Sequence
  Synthetic
QQYDNLPFT

SEQ ID NO: 1113 - protein, 127 aa, Artificial Sequence
  Synthetic
QVQLQESGPGLVKPSETLSLTCTVSGGSISSYYWSWIRQPPGKGLEWIGYIYYSGSTNYNPSLKSRVTISVDTSKNQFSLKLSSVTAADTAVYYCARVPSVGDCSSTSCLYWYFDLWGRGTLVTVSS

SEQ ID NO: 1114 - protein, 21 aa, Artificial Sequence
  Synthetic
ARVPSVGDCSSTSCLYWYFDL

SEQ ID NO: 1115 - protein, 106 aa, Artificial Sequence
  Synthetic
DIQMTQSPVSLSASVGDRVTITCRASQSISSWLAWYQQKPGKAPKLLIYKASSLESGVPSRFSGSGSGTEFTLTISSLQPDDFATYYCQQYNSYSTFGQGTKVEIK

SEQ ID NO: 1116 - protein, 8 aa, Artificial Sequence
  Synthetic
QQYNSYST

SEQ ID NO: 1117 - protein, 122 aa, Artificial Sequence
  Synthetic
QVQLVQSGAEVKKPGASVKVSCKASGYTFTNHYMHWVRQAPGQGLEWMGIINPGGGSTSYAQKFQGRVTMTSDTSTSTVYMELSSLRSEDTAVYYCAKDRGIIVSRDAFDIWGQGTMVTVSS

SEQ ID NO: 1118 - protein, 15 aa, Artificial Sequence
  Synthetic
AKDRGIIVSRDAFDI

SEQ ID NO: 1119 - protein, 107 aa, Artificial Sequence
  Synthetic
DIQMTQSPVSLSASVGDRVTITCRASQSIGNWLAWYQQKPGKAPNLLIYKASSLESGVPSRFSGSGSGTEFTLTISSLQPDDFATYYCQQYNNYSWTFGQGTKVEIK

SEQ ID NO: 1120 - protein, 9 aa, Artificial Sequence
  Synthetic
QQYNNYSWT

SEQ ID NO: 1121 - protein, 122 aa, Artificial Sequence
  Synthetic
QVQLVESGGGVVQPGRSLRLSCAASRFTFSSYGMHWVRQAPGKGLEWVAVIWHDGSNKYYADSVKGRFTISRDNSKNTVYLQMNSLRVEDTAVYYCARDESIMVTANEIDYWGQGTLVTVSS

SEQ ID NO: 1122 - protein, 15 aa, Artificial Sequence
  Synthetic
ARDESIMVTANEIDY

SEQ ID NO: 1123 - protein, 108 aa, Artificial Sequence
  Synthetic
DIQMTQSPVSLSASVGDRVTITCRASQTIISHLNWYQQKPGKAPNLLIYAASSLQSGVPSRFSGSGSGTDFTLTISSLQPEDFATYYCQQSYSTPPWTFGQGTKVEIK

SEQ ID NO: 1124 - protein, 10 aa, Artificial Sequence
  Synthetic
QQSYSTPPWT

SEQ ID NO: 1125 - protein, 126 aa, Artificial Sequence
  Synthetic
QVQLVESGGGVVQPGKSLRISCAASGFTFNNYALHWVRQAPGKGLEWVAVVAYDGNKQYYADSVKGRFTVSRDNSKNTLYLQMDSLRAEDTAVYYCARDGTTIMARGVMAPPFDYWGQGTLVTVSS

SEQ ID NO: 1126 - protein, 19 aa, Artificial Sequence
  Synthetic
ARDGTTIMARGVMAPPFDY

SEQ ID NO: 1127 - protein, 107 aa, Artificial Sequence
  Synthetic
DIQMTQSPVSLSASVGDRVIITCQASQHISNYLNWYQHKPGRAPKLLMHDASILETGVPSRFSGSGSGTHFTFTISNLQAEDIATYYCQQYDLFPITFGRGTRVEIK

SEQ ID NO: 1128 - protein, 9 aa, Artificial Sequence
  Synthetic
QQYDLFPIT

SEQ ID NO: 1129 - protein, 120 aa, Artificial Sequence
  Synthetic
EVQLLESGGGLVQPGGSLRLSCAASRFTFSNYAMSWVRQAPGKGLEWVSTISGSGGSTYYADSVKGRFTISRDNSKNTLYLQMNSLRAEDTAVYYCAKDRAAAHWATDYWGQGTLVTVSS

SEQ ID NO: 1130 - protein, 13 aa, Artificial Sequence
  Synthetic
AKDRAAAHWATDY

SEQ ID NO: 1131 - protein, 107 aa, Artificial Sequence
  Synthetic
  misc_feature (9)..(10): Xaa can be any naturally occurring amino acid
DIQMTQSPXXLSASVGDRVTITCQASQDISNYLNWYQQKPGKAPKLLIYDASNLETGVPSRFSGSGSGTDFTFTISSLQPEDIATYYCQQYDNRLFTFGPGTKVDIK

SEQ ID NO: 1132 - protein, 9 aa, Artificial Sequence
  Synthetic
QQYDNRLFT

SEQ ID NO: 1133 - protein, 128 aa, Artificial Sequence; identical to SEQ ID NO: 63
  Synthetic

SEQ ID NO: 1134 - protein, 20 aa, Artificial Sequence
  Synthetic
ARETFFYDRTGHYKSDGFDV

SEQ ID NO: 1135 - protein, 107 aa, Artificial Sequence
  Synthetic
  misc_feature (9)..(10): Xaa can be any naturally occurring amino acid
DIQMTQSPXXLSASVGDRVTISCRASQNISSWLAWYQQEAGKAPKLLIYKASSLESGVPSRFSGSGSGTEFTLTISSLQPGDFATYYCQQYNIYSYTFGQGTKLEIK

SEQ ID NO: 1136 - protein, 9 aa, Artificial Sequence
  Synthetic
QQYNIYSYT

SEQ ID NO: 1137 - protein, 124 aa, Artificial Sequence
  Synthetic
QVQLVESGGGVVQPGRSLRLSCAASGFTFSIYGMHWVRQAPGKGLEWVAVISYDGSNKYYADSVKGRFTISRDNSKNTLYLQMNSLRAEDTAVYYCAKEGRPSDIVVVVAFDYWGQGTLVTVSS

SEQ ID NO: 1138 - protein, 17 aa, Artificial Sequence
  Synthetic
AKEGRPSDIVVVVAFDY

SEQ ID NO: 1139 - protein, 107 aa, Artificial Sequence
  Synthetic
  misc_feature (9)..(9): Xaa can be any naturally occurring amino acid
DIQMTQSPXSLSASVGDRVTITCRASQSISSYLNWYQQKPGKAPKLLIYAASSLQSGVPSRFSGSGSGTDFTLTISSLQPEDFATYYCQQSYSTPRTFGQGTKVEIK

SEQ ID NO: 1140 - protein, 9 aa, Artificial Sequence
  Synthetic
QQSYSTPRT

SEQ ID NO: 1141 - protein, 121 aa, Artificial Sequence
  Synthetic
EVQLLESGGGLVQPGGSLRLSCAASGFTFSSYAMSWVRQAPGKGLEWVSAISGSGDITYYADSVKGRFTISRDNSKNTLYLQMNSLRAEDTAVYYCAKDSGTAMVEIFDYWGQGTLVTVSS

SEQ ID NO: 1142 - protein, 14 aa, Artificial Sequence
  Synthetic
AKDSGTAMVEIFDY

SEQ ID NO: 1143 - protein, 107 aa, Artificial Sequence
  Synthetic
  misc_feature (9)..(9): Xaa can be any naturally occurring amino acid
DIQMTQSPXSLSASVGDRVTITCRASQSISSYLNWYQQKPGKAPKLLIYAASSLQSGVPSRFSGSGSGTDFTLTISSLQPEDFATYFCQQSYSSTLTFGGGTKVEIK

SEQ ID NO: 1144 - protein, 9 aa, Artificial Sequence
  Synthetic
QQSYSSTLT

SEQ ID NO: 1145 - protein, 129 aa, Artificial Sequence
  Synthetic
EVQLVESGGGLVQPGGSLRLSCAASGFTFSSYWMSWVRQAPGKGLEWVANIKQDGSEKYYVDSVKGRFTISRDNAKNSLYLQMNSLRAEDTAVYYCARYCSGGSCHPPGQWLSDAFDIWGQGTMVTVSS

SEQ ID NO: 1146 - protein, 22 aa, Artificial Sequence
  Synthetic
ARYCSGGSCHPPGQWLSDAFDI

SEQ ID NO: 1147 - protein, 106 aa, Artificial Sequence
  Synthetic
  misc_feature (9)..(9): Xaa can be any naturally occurring amino acid
DIQMTQSPXSLSASVGDRVTITCRASQSISSYLNWYQQKPGKAPKLLIYAASSLQSGVPSRFSGSGSGTDFTLTISSLQPEDFATYYCQQSYSTWTFGQGTKVEIK

SEQ ID NO: 1148 - protein, 8 aa, Artificial Sequence
  Synthetic
QQSYSTWT

SEQ ID NO: 1149 - protein, 120 aa, Artificial Sequence
  Synthetic
QVQLQESGPGLVKPLDTLSLTCTVSGASISSYYWSWIRQPAGKGLEWIGLIYSSGSTTYNPSLKSRVTMSVDTSKKQFSLNLSSMTAADTAVYYCARGSALNWKSIGYFDSWGQGTRVIV

SEQ ID NO: 1150 - protein, 16 aa, Artificial Sequence
  Synthetic
ARGSALNWKSIGYFDS

SEQ ID NO: 1151 - protein, 107 aa, Artificial Sequence
  Synthetic
DIQMTQSPSSLSASIRDRVTITCQASQDISNYLNWYQQKAGEAPKLLIYDASSLETGVPSRFSGSGSGTEFTLTISSLQPEDIATYYCQQYDHVPLTFGGGTKVDIK

SEQ ID NO: 1152 - protein, 9 aa, Artificial Sequence
  Synthetic
QQYDHVPLT

SEQ ID NO: 1153 - protein, 118 aa, Artificial Sequence
  Synthetic
EVQLVESGGGLIQPGGSLRLSCAASGLIVSSNYMSWVRQAPGKGLEWVSIIYSGGSTFYIDSVKGRFTISRDNSKNTLYLQMNSLRPEDTAVYYCAREGGYREGMDVWGQGTTVTVSS

SEQ ID NO: 1154 - protein, 12 aa, Artificial Sequence
  Synthetic
AREGGYREGMDV

SEQ ID NO: 1155 - protein, 106 aa, Artificial Sequence
  Synthetic
DIQMTQSPSSLSASIGDRVTITCQASQDINKYLNWYQQKPGKAPKLLIYDASNLETGVPSRFSASGYGTDFTFTISGLQPEDIATYYCHQYDNLPRTFGQGTKVEI

SEQ ID NO: 1156 - protein, 9 aa, Artificial Sequence
  Synthetic
HQYDNLPRT

SEQ ID NO: 1157 - protein, 122 aa, Artificial Sequence
  Synthetic
QVQLVQSGTEVKRPGASVRVSCKASGYTFTSYYIHWVRQAPGQGFEWMGIINPSGGSITYAQKMQDRITLTRDTSTSTVYMDLSSLRSEDTAVYYCARGGVAPSLRDAFDFWGQGTMVTVSS

SEQ ID NO: 1158 - protein, 15 aa, Artificial Sequence
  Synthetic
ARGGVAPSLRDAFDF

SEQ ID NO: 1159 - protein, 107 aa, Artificial Sequence
  Synthetic
DIQMTQSPSSLSASVRDRVTITCRASQNIIKFLHWYQQKPGQAPKLLIYAASNLESGVPSRFSGNGSGTDFTLTISSLQPEDFATYYCQQTHSPLYTFGQGTKLEVK

SEQ ID NO: 1160 - protein, 9 aa, Artificial Sequence
  Synthetic
QQTHSPLYT

SEQ ID NO: 1161 - protein, 118 aa, Artificial Sequence
  Synthetic
QVQLVESGGGVVQPGRSLRLSCVASGFSFSNYGMHWVRQAPGKGLEWVAAIWYDGVDKYRDSVKGRFTISRDNSKNTLYLQMNSLRVEDTAVYYCARVFGNWDDFDYWGQGTLVTVSS

SEQ ID NO: 1162 - protein, 12 aa, Artificial Sequence
  Synthetic
ARVFGNWDDFDY

SEQ ID NO: 1163 - protein, 107 aa, Artificial Sequence
  Synthetic
DIQMTQSPSSLSASVGDRATITCRASQGITNDLGWYQQKPGKAPKRLIYGASSLQSGVPSRFSGSGSGTEFTLTISSLQPEDFATYYCLQHNSYPWTFGQGTKVEIK

SEQ ID NO: 1164 - protein, 9 aa, Artificial Sequence
  Synthetic
LQHNSYPWT

SEQ ID NO: 1165 - protein, 125 aa, Artificial Sequence
  Synthetic
QLQLQESGPGLVKPSETLSLTCTVSGGSISSSSHNWGWIRQPPGKGLEWIGSIYYSGGTYYNPSLKSRLTMSVDTSKNQFSLKLTSVTAADTAVYYCGRRGGRTPVRFNYGMDVWGQGTTVIVSS

SEQ ID NO: 1166 - protein, 17 aa, Artificial Sequence
  Synthetic
GRRGGRTPVRFNYGMDV

SEQ ID NO: 1167 - protein, 107 aa, Artificial Sequence
  Synthetic
DIQMTQSPSSLSASVGDRVTITCQANQDITNYLNWFQLKRGKAPKLLIYDAFNLETGVPSRFSGSGSGTDFTLTISSLQPEDIATYYCQQYDNLPLTFGGGTKVEIK

SEQ ID NO: 1168 - protein, 9 aa, Artificial Sequence
  Synthetic
QQYDNLPLT

SEQ ID NO: 1169 - protein, 119 aa, Artificial Sequence
  Synthetic
QVQLVQSGAEVKKPGSSVKVSCKASGGTFSSYAISWVRQAPGQGLEWMGGIIPIFGTANYAQKFQGRVTITADESTSTAYMELSSLRSEDTAVYYCARDLQNRGGMDVWGQGTTVTVSS

SEQ ID NO: 1170 - protein, 12 aa, Artificial Sequence
  Synthetic
ARDLQNRGGMDV

SEQ ID NO: 1171 - protein, 107 aa, Artificial Sequence
  Synthetic
DIQMTQSPSSLSASVGDRVTITCQASHDISTYLNWYQHKPGKAPKVLIYDASNLQTGVPSRFSGSGSGTHFTFTISSLQPEDVATYYCHQYDNLPPTFGGGTKVELK

SEQ ID NO: 1172 - protein, 9 aa, Artificial Sequence
  Synthetic
HQYDNLPPT

SEQ ID NO: 1173 - protein, 127 aa, Artificial Sequence; identical to SEQ ID NO: 11
  Synthetic

SEQ ID NO: 1174 - protein, 20 aa, Artificial Sequence
  Synthetic
ARDGTIVTLVRGVMGPPFDY

SEQ ID NO: 1175 - protein, 107 aa, Artificial Sequence; identical to SEQ ID NO: 12
  Synthetic

SEQ ID NO: 1176 - protein, 9 aa, Artificial Sequence
  Synthetic
QQYDNLPPV

SEQ ID NO: 1177 - protein, 123 aa, Artificial Sequence
  Synthetic
EVQLVESGGGLVQPGRSLRLSCAASGFTFDKNALHWVRQAPGKGLEWVSGISWNSGSIGYADSVRGRFTISRDNAKNSLYLHMNSLRVEDTALYYCAKDRREDIVVGGYFDLWGRGTLVTVSS

SEQ ID NO: 1178 - protein, 16 aa, Artificial Sequence
  Synthetic
AKDRREDIVVGGYFDL

SEQ ID NO: 1179 - protein, 107 aa, Artificial Sequence
  Synthetic
DIQMTQSPSSLSASVGDRVTITCQASQDTNNYLNWYQQKPGKAPNLLIYDVSKLETGVPSRFSGSGSGTDFTFTISRLQPEDFATYYCQQYNTFPFTFGPGTKVDIK

SEQ ID NO: 1180 - protein, 9 aa, Artificial Sequence
  Synthetic
QQYNTFPFT

SEQ ID NO: 1181 - protein, 122 aa, Artificial Sequence
  Synthetic
QVQLVESGGGVVQPGRSLRLSCAASGFTFSSYGMHWVRQAPGKGLEWVAVISYDGSNKYYADSVKGRFTISRDNSKNTLYLQMNSLRAEDTAVYYCAKNQNSYGYLSYFDYWGQGTLVTVSS

SEQ ID NO: 1182 - protein, 15 aa, Artificial Sequence
  Synthetic
AKNQNSYGYLSYFDY

SEQ ID NO: 1183 - protein, 107 aa, Artificial Sequence
  Synthetic
DIQMTQSPSSLSASVGDRVTITCQASQDINNYLNWYQQKPGKAPKLLIYDASNLETGVPSRFSGSGSGTDFAFTISSLQPEDIATYYCQQYDNLPRTFGQGTKVEIK

SEQ ID NO: 1184 - protein, 9 aa, Artificial Sequence
  Synthetic
QQYDNLPRT

SEQ ID NO: 1185 - protein, 125 aa, Artificial Sequence
  Synthetic
QVQLVESGGGVVQPGRSLRLSCAASGFTFSRYGMHWVRQAPGKGLEWVAVSSYDGSNEYYANSVKGRFTISRDNSKNTLYLQMNSLRAEDTAVYYCAKTGASYCGGDCPFHFDYWGQGTLVIVSS

SEQ ID NO: 1186 - protein, 18 aa, Artificial Sequence
  Synthetic
AKTGASYCGGDCPFHFDY

SEQ ID NO: 1187 - protein, 107 aa, Artificial Sequence
  Synthetic
DIQMTQSPSSLSASVGDRVTITCQASQDINNYLNWYQQKPGKAPKLLIYDASDLETGVPSRFSGGGSGTDFTFTISSLQPEDIATYYCQHYNNLPITFGQGTRLEIK

SEQ ID NO: 1188 - protein, 9 aa, Artificial Sequence
  Synthetic
QHYNNLPIT

SEQ ID NO: 1189 - protein, 127 aa, Artificial Sequence
  Synthetic
QVQLVQSGAEVKKPGSSVKVSCKASGGTFSSYAISWVRQAPGQGLEWMGGIIPIFGTANYAQKFQGRVTITADESTSTAYMELSSLRSEDTAVYYCARVLYYYDSSGYPNLEYFQHWGQGTLVTVSS

SEQ ID NO: 1190 - protein, 20 aa, Artificial Sequence
  Synthetic
ARVLYYYDSSGYPNLEYFQH

SEQ ID NO: 1191 - protein, 108 aa, Artificial Sequence
  Synthetic
  misc_feature (104)..(104): Xaa can be any naturally occurring amino acid
DIQMTQSPSSLSASVGDRVTITCQASQDISNYLNWYQQKPGKAPKLLIYDASNLEAGVPSRFSGSGSGTDFTFTISSLQPEDIATYYCQQYDNLPSFTFGPGTXVDIK

SEQ ID NO: 1192 - protein, 10 aa, Artificial Sequence
  Synthetic
QQYDNLPSFT

SEQ ID NO: 1193 - protein, 128 aa, Artificial Sequence
  Synthetic
QVQLVESGGGVVQPGRSLRLSCAASGFTFSSYGMHWVRQAPGKGLEWVAVISYDGSNKYYADSVKGRFTISRDNSKNTLYLQMNSLRAEDTAVYYCAKDTPGGDDILTGWGLYGMDVWGQGTTVTVSS

SEQ ID NO: 1194 - protein, 21 aa, Artificial Sequence
  Synthetic
AKDTPGGDDILTGWGLYGMDV

SEQ ID NO: 1195 - protein, 107 aa, Artificial Sequence
  Synthetic
DIQMTQSPSSLSASVGDRVTITCQASQDISNYLNWYQHHPGKAPKLLIHDASILETGVPTRFSGTGSGTKFTFTISSLQPEDIATYYCQQYHYLPPHFGPGTKVDSK

SEQ ID NO: 1196 - protein, 9 aa, Artificial Sequence
  Synthetic
QQYHYLPPH

SEQ ID NO: 1197 - protein, 127 aa, Artificial Sequence
  Synthetic
QVQLVESGGGVVQPGRSLRLSCAASGFTFSRYGMHWVRQAPGKGLEWVAVISYDGSNKYYADSVKGRFTISRDNSKNTLYLQMNSLRAEDTAVYYCAKVTAPYCSGGSCYGGNFDYWGQGTLVTVSS

SEQ ID NO: 1198 - protein, 20 aa, Artificial Sequence
  Synthetic
AKVTAPYCSGGSCYGGNFDY

SEQ ID NO: 1199 - protein, 107 aa, Artificial Sequence
  Synthetic
DIQMTQSPSSLSASVGDRVTITCQASQDISNYLNWYQQKPGKAPKLLIYDASNLETGVPSRFSGSGSGTDFTFTINSLQPEDIATYYCQQYDNLPPTFGGGTKVEIK

SEQ ID NO: 1200 - protein, 9 aa, Artificial Sequence
  Synthetic
QQYDNLPPT

SEQ ID NO: 1201 - protein, 130 aa, Artificial Sequence
  Synthetic
QLQLQESGPGLVKPSETLSLTCTVSGGSISSSNYYWGWIRQPPGKGLEWIGSIYYSGSTYYNPSLKSRVTISVDTSKSQFSLKLSSVTAADTAVYYCARALKYYDILTGYSEPRTFLDYWGQGTLVTVSS

SEQ ID NO: 1202 - protein, 22 aa, Artificial Sequence
  Synthetic
ARALKYYDILTGYSEPRTFLDY

SEQ ID NO: 1203 - protein, 107 aa, Artificial Sequence
  Synthetic
DIQMTQSPSSLSASVGDRVTITCQASQDISNYLNWYQQKPGKAPKLLIYDASNLETGVPSRFSGSGSGTDFTFTISSLQPEDIATYYCQQYDNLPITFGQGTRLEIK

SEQ ID NO: 1204 - protein, 9 aa, Artificial Sequence
  Synthetic
QQYDNLPIT

SEQ ID NO: 1205 - protein, 120 aa, Artificial Sequence
  Synthetic
QVQLVESGGGLVKPGGSLRLSCAASGFIFSDYYMSWIRQAPGKGLEWVSYISSSASTIYYADSVKGRFTISRDNAKNSLYLQMNSLRAEDTAVYYCARGLVYTPYRFGYWGQGTLVTVSS

SEQ ID NO: 1206 - protein, 13 aa, Artificial Sequence
  Synthetic
ARGLVYTPYRFGY

SEQ ID NO: 1207 - protein, 106 aa, Artificial Sequence
  Synthetic
DIQMTQSPSSLSASVGDRVTITCQASQDISNYLNWYQQKPGKAPKLLIYDASNLETGVPSRFSGSGSGTDFTFTISSLQPEDIATYYCQQHDNVVTFGPGTKVEIK

SEQ ID NO: 1208 - protein, 8 aa, Artificial Sequence
  Synthetic
QQHDNVVT

SEQ ID NO: 1209 - protein, 128 aa, Artificial Sequence
  Synthetic
QVQLVQSGAEVKKPGSSVKVSCKASGGTFSSYAISWVRQAPGQGLEWMGGIIPIFYTANYAQKFQGRVTITADKSTSTAYMELSSLRSEDTAVYYCARDEGYCSGGSCYGYYYGMDVWGQGTTVTVSS

SEQ ID NO: 1210 - protein, 21 aa, Artificial Sequence
  Synthetic
ARDEGYCSGGSCYGYYYGMDV

SEQ ID NO: 1211 - protein, 108 aa, Artificial Sequence
  Synthetic
DIQMTQSPSSLSASVGDRVTITCQASQDISNYLNWYQQKPGKAPKLLIYDASNLETGVPSRFSGSGSGTDFTFTISSLQPEDIATYYCQQYDNLPMYTFGQGTKLEIK

SEQ ID NO: 1212 - protein, 10 aa, Artificial Sequence
  Synthetic
QQYDNLPMYT

SEQ ID NO: 1213 - protein, 128 aa, Artificial Sequence
  Synthetic
QVQLVQSGAEVKKPGASVKVSCKASGYTFTGYYMHWVRQAPGQGLEWMGWLNPISGGTNYAQKFQGRVTMTRDTSISTAYMELSRLRSDDTAVYYCASPASRGYSGYDHGYYYYMDVWGKGTTVTVSS

SEQ ID NO: 1214 - protein, 21 aa, Artificial Sequence
  Synthetic
ASPASRGYSGYDHGYYYYMDV

SEQ ID NO: 1215 - protein, 107 aa, Artificial Sequence; identical to SEQ ID NO: 1203
  Synthetic

SEQ ID NO: 1216 - protein, 9 aa, Artificial Sequence
  Synthetic
QQYDNLPIT

SEQ ID NO: 1217 - protein, 128 aa, Artificial Sequence
  Synthetic
QVQLVQSGAEVKKPGASVKVSCKASGYTFTGYYMHWVRQAPGQGLEWMGWINPISGGTNYAQKFQGRVTMTRDTSISTAYMELSRLRSDDTAVYYCASPASRGYSGYDHGYYYYMDVWGKGTTVTVSS

SEQ ID NO: 1218 - protein, 21 aa, Artificial Sequence
  Synthetic
ASPASRGYSGYDHGYYYYMDV

SEQ ID NO: 1219 - protein, 107 aa, Artificial Sequence; identical to SEQ ID NO: 1203
  Synthetic

SEQ ID NO: 1220 - protein, 9 aa, Artificial Sequence
  Synthetic
QQYDNLPIT

SEQ ID NO: 1221 - protein, 128 aa, Artificial Sequence; identical to SEQ ID NO: 1217
  Synthetic

SEQ ID NO: 1222 - protein, 21 aa, Artificial Sequence
  Synthetic
ASPASRGYSGYDHGYYYYMDV

SEQ ID NO: 1223 - protein, 107 aa, Artificial Sequence; identical to SEQ ID NO: 1203
  Synthetic

SEQ ID NO: 1224 - protein, 9 aa, Artificial Sequence
  Synthetic
QQYDNLPIT

SEQ ID NO: 1225 - protein, 119 aa, Artificial Sequence
  Synthetic
EVQLLESGGGLVQPGGSLRLSCAASGFTFSSYAMSWVRQAPGKGLEWVSGISDSGVSTYYADSVKGRFTISRDNSKNTLYLQMNSLRAEDTAVYYCANHGDYVGYMDVWGKGTTVTVSS

SEQ ID NO: 1226 - protein, 12 aa, Artificial Sequence
  Synthetic
ANHGDYVGYMDV

SEQ ID NO: 1227 - protein, 108 aa, Artificial Sequence
  Synthetic
DIQMTQSPSSLSASVGDRVTITCQASQDISNYLNWYQQKPGKAPKLLIYDASNLETGVPSRFSGSGSGTDFTFTISSLQPEDIATYYCQQYDNLPPYTFGQGTKLEIK

SEQ ID NO: 1228 - protein, 10 aa, Artificial Sequence
  Synthetic
QQYDNLPPYT

SEQ ID NO: 1229 - protein, 127 aa, Artificial Sequence
  Synthetic
QVQLVESGGGVVQPGRSLRLSCAASGFTFRRYGIHWVRQAPGKGLEWVAVISYDGSNKYYADSVKGRFTISRDNSKNTLYLQMNSLRAEDTAVYYCAKASGEYCGGGSCYRGVFDYWGQGTLVTVSS

SEQ ID NO: 1230 - protein, 20 aa, Artificial Sequence
  Synthetic
AKASGEYCGGGSCYRGVFDY

SEQ ID NO: 1231 - protein, 106 aa, Artificial Sequence
  Synthetic
DIQMTQSPSSLSASVGDRVTITCQASQDISNYLNWYQQKPGKAPELLIYDASNLETGVPSRFSGSGSGTDFTFTISSLQPEDIATYYCQQYDNLPLTFGGGTKVEI

SEQ ID NO: 1232 - protein, 9 aa, Artificial Sequence
  Synthetic
QQYDNLPLT

SEQ ID NO: 1233 - protein, 124 aa, Artificial Sequence
  Synthetic
QVQLQESGPGLVKPSQTLSLTCTVSGGSISSGGYYWSWIRQHPGKGLEWIEYIYYSGSTYYNPSLKSRVTISVDTSKNQFSLKLSSVTAADTAVYYCARAQAVGANYAAAFDIWGQGTMVTVSS

SEQ ID NO: 1234 - protein, 16 aa, Artificial Sequence
  Synthetic
ARAQAVGANYAAAFDI

SEQ ID NO: 1235 - protein, 107 aa, Artificial Sequence
  Synthetic
  misc_feature (44)..(44): Xaa can be any naturally occurring amino acid
DIQMTQSPSSLSASVGDRVTITCQASQDISNYLNWYQQKPGKAXKLLIYDALNLETGVPSRFSGSGSGTDFTFTISSLQPEDIATYYCQQYDNLPITFGQGTRLEIK

SEQ ID NO: 1236 - protein, 9 aa, Artificial Sequence
  Synthetic
QQYDNLPIT

SEQ ID NO: 1237 - protein, 123 aa, Artificial Sequence
  Synthetic
EVQLVESGGGLVKPGGSLRLSCAASGFTFSNAWMSWVRQAPGRGLEWVGRIKSKTDGGTTDYAAPVKGRFTISRDDSKNTLYLQMNSLKTEDTAVYYCTTDDPGSYYYGMDVWGQGTTVTVSS

SEQ ID NO: 1238 - protein, 14 aa, Artificial Sequence
  Synthetic
TTDDPGSYYYGMDV

SEQ ID NO: 1239 - protein, 105 aa, Artificial Sequence
  Synthetic
DIQMTQSPSSLSASVGDRVTITCQASQDISNYLNWYQQKPGKVPKLLIYDASNLEAGVPSRFSGSGSGKDFTFTISSLQPEDIATYYCQQYDSFPITFGPGTKVD

SEQ ID NO: 1240 - protein, 9 aa, Artificial Sequence
  Synthetic
QQYDSFPIT

SEQ ID NO: 1241 - protein, 127 aa, Artificial Sequence
  Synthetic
EVQLVESGGGLVKPGGSLRLSCAASGFTFKYAWMNWVRQAPGKGLEWVGRVKSKVDGGTTDYAAPVQGRFTISRDDSKNTLSLQMNSLKTEDTAVYYCTTDWRLSFEVVEHDAFHIWGQGTVVTVSS

SEQ ID NO: 1242 - protein, 18 aa, Artificial Sequence
  Synthetic
TTDWRLSFEVVEHDAFHI

SEQ ID NO: 1243 - protein, 105 aa, Artificial Sequence
  Synthetic
DIQMTQSPSSLSASVGDRVTITCRASQTVSTFLNWYQQKPGKAPQLLIYAASTLQSGVPSRFSGSGSGTDFTLTINSLQPEDFATYYCQQSYNSLTFGQGTRLEI

SEQ ID NO: 1244 - protein, 8 aa, Artificial Sequence
  Synthetic
QQSYNSLT

SEQ ID NO: 1245 - protein, 123 aa, Artificial Sequence
  Synthetic
EVQLVESGGGLVQPGGSLRLSCAASGFTFSSYDMHWVRQATGKGLEWVSTIGTAGDTYYPGSVKGRFTISRENAKNSLYLQLNSLRAGDTAVYYCARANYDSSGLGLGYFDYWGQGTLVTVSS

SEQ ID NO: 1246 - protein, 17 aa, Artificial Sequence
  Synthetic
ARANYDSSGLGLGYFDY

SEQ ID NO: 1247 - protein, 108 aa, Artificial Sequence
  Synthetic
DIQMTQSPSSLSASVGDRVTITCRASQRISSYLNWYQQKPGKAPKLLIYAASSLQSGVPSRFSGSGSGTDFTLTISSLQPEDFATYYCQQSYSTPPITFGQGTRLEIK

SEQ ID NO: 1248 - protein, 10 aa, Artificial Sequence
  Synthetic
QQSYSTPPIT

SEQ ID NO: 1249 - protein, 126 aa, Artificial Sequence
  Synthetic
QVQLVESGGGVVQPGRSLRLSCAASGFTSTNYDMHWVRQAPGKGLEWVAVISSDGSSRFYADSVKGRFTISRDNSKNTVYLEMNSLRTEDTAIYHCARDPNDDSGYYYPVPLLDYWGQGTLVTVSS

SEQ ID NO: 1250 - protein, 19 aa, Artificial Sequence
  Synthetic
ARDPNDDSGYYYPVPLLDY

SEQ ID NO: 1251 - protein, 108 aa, Artificial Sequence
  Synthetic
DIQMTQSPSSLSASVGDRVTITCRASQSINTYLNWYQRKPGKAPKLLIYAASRLQSGVPSRFSGSGSGTDFTLTISSLQTEDLATYFCQQSYSNFPITFGPGTKVDLK

SEQ ID NO: 1252 - protein, 10 aa, Artificial Sequence
  Synthetic
QQSYSNFPIT

SEQ ID NO: 1253 - protein, 120 aa, Artificial Sequence
  Synthetic
EVQLVESGGGLVQPGGSLRLSCAASGFTFGSYDMHWVRQVPGKGLEWVSVIGSAGDTYYQDSVKGRFTISRENAKNSLYLQMNSLRAGDAAVYYCARGAMATPVWDLDLWGRGTLVTVSS

SEQ ID NO: 1254 - protein, 14 aa, Artificial Sequence
  Synthetic
ARGAMATPVWDLDL

SEQ ID NO: 1255 - protein, 108 aa, Artificial Sequence
  Synthetic
DIQMTQSPSSLSASVGDRVTITCRASQSIRNFLNWYQQKPGKAPKLLIYAASSLQSGVPSRFSGSGSGTDFTLTISSLQPEDFATYYCQQSYSSPPITFGQGTRLEIK

SEQ ID NO: 1256 - protein, 10 aa, Artificial Sequence
  Synthetic
QQSYSSPPIT

SEQ ID NO: 1257 - protein, 124 aa, Artificial Sequence
  Synthetic
QVQLVESGGGVVQPGRSLRLSCAASGLAFSIYGMHWVRQAPGKGLEWVAIVAQDGSKKYYADSVKGRFTISRDNSKNTLYLEMNSLRTEDTAVYYCVKEGRPSDTVVVVAFDYWGQGSLVTVSS

SEQ ID NO: 1258 - protein, 17 aa, Artificial Sequence
  Synthetic
VKEGRPSDTVVVVAFDY

SEQ ID NO: 1259 - protein, 107 aa, Artificial Sequence
  Synthetic
DIQMTQSPSSLSASVGDRVTITCRASQSISNYLNWYQQKPGKAPKVIIYAASSLQSGVPSRFSGSGSGTDFTLTISSLQPEDFATYYCQQSHSIPRTFGQGTKVEIK

SEQ ID NO: 1260 - protein, 9 aa, Artificial Sequence
  Synthetic
QQSHSIPRT

SEQ ID NO: 1261 - protein, 123 aa, Artificial Sequence
  Synthetic
QVQLVESGGGVVQPGRSLRLSCAASGFTFSSYAMHWVRQAPAKGLEWVAVILYDGSGKYYADSVKGRFTISRDNSKNTLYLQMNSLRAEDTAVYYCARDGIVDTALVTWFDYWGQGTLVTVSS

SEQ ID NO: 1262 - protein, 16 aa, Artificial Sequence
  Synthetic
ARDGIVDTALVTWFDY

SEQ ID NO: 1263 - protein, 108 aa, Artificial Sequence
  Synthetic
DIQMTQSPSSLSASVGDRVTITCRASQSISTYLNWYQQKPGKAPKLLIYAASSLQSGVPSRFSGSGSGTDFTLTISSLQPEDFATYYCQQSYSTPPWTFGQGTKVEIK

SEQ ID NO: 1264 - protein, 10 aa, Artificial Sequence
  Synthetic
QQSYSTPPWT

SEQ ID NO: 1265 - protein, 127 aa, Artificial Sequence
  Synthetic
QVQLQQWGAGLLKPSETLSLTCAVYGGSFNGYSWTWIRQPPGRGLEWIGEINHSGTTTYNPSLVSRVTISVDTSKNQFSLTLRSVTAADAAIYYCARETIVVVPAAILRYHYYMDVWGKGTTVTVSS

SEQ ID NO: 1266 - protein, 21 aa, Artificial Sequence
  Synthetic
ARETIVVVPAAILRYHYYMDV

SEQ ID NO: 1267 - protein, 107 aa, Artificial Sequence
  Synthetic
DIQMTQSPSSLSASVGDRVTITCRASQSISTYLSWYQQKPGKAPKLLIYAASSLQSGVPSRFSGSGSGTDFTLTISSLQPEDFATYFCQQSYTTPYTFGQGTKLEIK

SEQ ID NO: 1268 - protein, 9 aa, Artificial Sequence
  Synthetic
QQSYTTPYT

SEQ ID NO: 1269 - protein, 127 aa, Artificial Sequence
  Synthetic
QVQLVQSGAEVKKPGSSVKVSCKASGGTFSIYSLTWVRQAPGQGLEWMGGIIPMSGTPHYAQKFQGRVTITADADESTTTAYMELNSLRSEDTAVYFCARGGRYCNSTICYPYFDYWGQGTLVAVSS

SEQ ID NO: 1270 - protein, 18 aa, Artificial Sequence
  Synthetic
ARGGRYCNSTICYPYFDY

SEQ ID NO: 1271 - protein, 107 aa, Artificial Sequence
  Synthetic
DIQMTQSPSSLSASVGDRVTITCRASQSISSYLNWYQQKVGKAPKLLIYAASSLQSGVPSRFSGSGSGTEFTLTISSLQPEDFATYYCQHSYSGPYTFGQGTKLEMK

SEQ ID NO: 1272 - protein, 9 aa, Artificial Sequence
  Synthetic
QHSYSGPYT

SEQ ID NO: 1273 - protein, 122 aa, Artificial Sequence
  Synthetic
QVQLVESGGGVVRPGRSLRLSCAASGFTFNNYGMHWVRQAPGKGLEWVAVIGSDGHIKHYADSVKGRFTISRDNSKNTLYLQLNSLRAEDTAMYYCARDQSLEEFLVTWFDPWGQGTLVTVS

SEQ ID NO: 1274 - protein, 16 aa, Artificial Sequence
  Synthetic
ARDQSLEEFLVTWFDP

SEQ ID NO: 1275 - protein, 108 aa, Artificial Sequence
  Synthetic
DIQMTQSPSSLSASVGDRVTITCRASQSISSYLNWYQQKPGKAPKLLIHAASSLQSGVPSRFSGSGSGTDFTLTINSLQPEDFATYYCQQSYNTPPWTFGQGTKVEIK

SEQ ID NO: 1276 - protein, 10 aa, Artificial Sequence
  Synthetic
QQSYNTPPWT

SEQ ID NO: 1277 - protein, 121 aa, Artificial Sequence
  Synthetic
QVQLVESGGGVVQPGRSLRLSCAASGFTFSSYGMHWVRQAPGKGLEWVAVISYDGSSKFYADSVKGRFTISRDNSKNTLYLQMNSLRAEDTAVYYCARDYGSSWYQVPDYWGQGTLVTVSS

SEQ ID NO: 1278 - protein, 14 aa, Artificial Sequence
  Synthetic
ARDYGSSWYQVPDY

SEQ ID NO: 1279 - protein, 108 aa, Artificial Sequence
  Synthetic
DIQMTQSPSSLSASVGDRVTITCRASQSISSYLNWYQQKPGKAPKLLIYAASSLQSGVPSRFSGSRSGTDFTLTISSLQPEDFATYYCQQSYSTPPLTFGGGTKVEIK

SEQ ID NO: 1280 - protein, 10 aa, Artificial Sequence
  Synthetic
QQSYSTPPLT

SEQ ID NO: 1281 - protein, 124 aa, Artificial Sequence; identical to SEQ ID NO: 1137
  Synthetic

SEQ ID NO: 1282 - protein, 17 aa, Artificial Sequence
  Synthetic
AKEGRPSDIVVVVAFDY

SEQ ID NO: 1283 - protein, 107 aa, Artificial Sequence
  Synthetic
DIQMTQSPSSLSASVGDRVTITCRASQSISSYLNWYQQKPGKAPKLLIYAASSLQSGVPSRFSGSGSGTDFTLTISSLQPEDFATYYCQQSYSTPRTFGQGTKVEIK

SEQ ID NO: 1284 - protein, 9 aa, Artificial Sequence
  Synthetic
QQSYSTPRT

SEQ ID NO: 1285 - protein, 124 aa, Artificial Sequence; identical to SEQ ID NO: 1137
  Synthetic

SEQ ID NO: 1286 - protein, 17 aa, Artificial Sequence
  Synthetic
AKEGRPSDIVVVVAFDY

SEQ ID NO: 1287 - protein, 107 aa, Artificial Sequence; identical to SEQ ID NO: 1283
  Synthetic

SEQ ID NO: 1288 - protein, 9 aa, Artificial Sequence
  Synthetic
QQSYSTPRT

SEQ ID NO: 1289 - protein, 124 aa, Artificial Sequence; identical to SEQ ID NO: 1137
  Synthetic

SEQ ID NO: 1290 - protein, 17 aa, Artificial Sequence
  Synthetic
AKEGRPSDIVVVVAFDY

SEQ ID NO: 1291 - protein, 107 aa, Artificial Sequence; identical to SEQ ID NO: 1283
  Synthetic

SEQ ID NO: 1292 - protein, 9 aa, Artificial Sequence
  Synthetic
QQSYSTPRT

SEQ ID NO: 1293 - protein, 124 aa, Artificial Sequence; identical to SEQ ID NO: 1137
  Synthetic

SEQ ID NO: 1294 - protein, 17 aa, Artificial Sequence
  Synthetic
AKEGRPSDIVVVVAFDY

SEQ ID NO: 1295 - protein, 107 aa, Artificial Sequence; identical to SEQ ID NO: 1283
  Synthetic

SEQ ID NO: 1296 - protein, 9 aa, Artificial Sequence
  Synthetic
QQSYSTPRT

SEQ ID NO: 1297 - protein, 124 aa, Artificial Sequence; identical to SEQ ID NO: 1137
  Synthetic

SEQ ID NO: 1298 - protein, 17 aa, Artificial Sequence
  Synthetic
AKEGRPSDIVVVVAFDY

SEQ ID NO: 1299 - protein, 107 aa, Artificial Sequence; identical to SEQ ID NO: 1283
  Synthetic

SEQ ID NO: 1300 - protein, 9 aa, Artificial Sequence
  Synthetic
QQSYSTPRT

SEQ ID NO: 1301 - protein, 124 aa, Artificial Sequence; identical to SEQ ID NO: 1137
  Synthetic

SEQ ID NO: 1302 - protein, 17 aa, Artificial Sequence
  Synthetic
AKEGRPSDIVVVVAFDY

SEQ ID NO: 1303 - protein, 107 aa, Artificial Sequence; identical to SEQ ID NO: 1283
  Synthetic

SEQ ID NO: 1304 - protein, 9 aa, Artificial Sequence
  Synthetic
QQSYSTPRT

SEQ ID NO: 1305 - protein, 124 aa, Artificial Sequence; identical to SEQ ID NO: 1137
  Synthetic

SEQ ID NO: 1306 - protein, 17 aa, Artificial Sequence
  Synthetic
AKEGRPSDIVVVVAFDY

SEQ ID NO: 1307 - protein, 107 aa, Artificial Sequence; identical to SEQ ID NO: 1283
  Synthetic

SEQ ID NO: 1308 - protein, 9 aa, Artificial Sequence
  Synthetic
QQSYSTPRT

SEQ ID NO: 1309 - protein, 120 aa, Artificial Sequence; identical to SEQ ID NO: 43
  Synthetic

SEQ ID NO: 1310 - protein, 13 aa, Artificial Sequence
  Synthetic
ARDQGMATTYFDY

SEQ ID NO: 1311 - protein, 108 aa, Artificial Sequence; identical to SEQ ID NO: 44
  Synthetic

SEQ ID NO: 1312 - protein, 10 aa, Artificial Sequence
  Synthetic
QQSYNTPPWT

SEQ ID NO: 1313 - protein, 124 aa, Artificial Sequence; identical to SEQ ID NO: 1137
  Synthetic

SEQ ID NO: 1314 - protein, 17 aa, Artificial Sequence
  Synthetic
AKEGRPSDIVVVVAFDY

SEQ ID NO: 1315 - protein, 107 aa, Artificial Sequence; identical to SEQ ID NO: 1283
  Synthetic

SEQ ID NO: 1316 - protein, 9 aa, Artificial Sequence
  Synthetic
QQSYSTPRT

SEQ ID NO: 1317 - protein, 124 aa, Artificial Sequence; identical to SEQ ID NO: 1137
  Synthetic

SEQ ID NO: 1318 - protein, 17 aa, Artificial Sequence
  Synthetic
AKEGRPSDIVVVVAFDY

SEQ ID NO: 1319 - protein, 107 aa, Artificial Sequence; identical to SEQ ID NO: 1283
  Synthetic

SEQ ID NO: 1320 - protein, 9 aa, Artificial Sequence
  Synthetic
QQSYSTPRT

SEQ ID NO: 1321 - protein, 132 aa, Artificial Sequence
  Synthetic
QVQLVQSGAEVKKPGASVKVSCKASGYTFTSYYMHWVRQAPGQGLEWMGIINPSGGSTTYAQKFQGRVTMTRDTSTSTVYMELSSLRSEDTAVYYCARDRAETEGSETYYYDSSGYYLLGYWGQGTLVTVSS

SEQ ID NO: 1322 - protein, 25 aa, Artificial Sequence
  Synthetic
ARDRAETEGSETYYYDSSGYYLLGY

SEQ ID NO: 1323 - protein, 107 aa, Artificial Sequence
  Synthetic
DIQMTQSPSSLSASVGDRVTITCRASQSISSYLNWYQQKPGKAPKLLIYAASSLQSGVPSRFSGSGSGTDFTLTISSLQPEDFATYYCQQSYSTPPSFGQGTKVEIK

SEQ ID NO: 1324 - protein, 9 aa, Artificial Sequence
  Synthetic
QQSYSTPPS

SEQ ID NO: 1325 - protein, 124 aa, Artificial Sequence; identical to SEQ ID NO: 1137
  Synthetic

SEQ ID NO: 1326 - protein, 17 aa, Artificial Sequence
  Synthetic
AKEGRPSDIVVVVAFDY

SEQ ID NO: 1327 - protein, 107 aa, Artificial Sequence; identical to SEQ ID NO: 1283
  Synthetic

SEQ ID NO: 1328 - protein, 9 aa, Artificial Sequence
  Synthetic
QQSYSTPRT

SEQ ID NO: 1329 - protein, 124 aa, Artificial Sequence; identical to SEQ ID NO: 1137
  Synthetic

SEQ ID NO: 1330 - protein, 17 aa, Artificial Sequence
  Synthetic
AKEGRPSDIVVVVAFDY

SEQ ID NO: 1331 - protein, 107 aa, Artificial Sequence; identical to SEQ ID NO: 1283
  Synthetic

SEQ ID NO: 1332 - protein, 9 aa, Artificial Sequence
  Synthetic
QQSYSTPRT

SEQ ID NO: 1333 - protein, 132 aa, Artificial Sequence; identical to SEQ ID NO: 1321
  Synthetic

SEQ ID NO: 1334 - protein, 25 aa, Artificial Sequence
  Synthetic
ARDRAETEGSETYYYDSSGYYLLGY

SEQ ID NO: 1335 - protein, 107 aa, Artificial Sequence; identical to SEQ ID NO: 1323
  Synthetic

SEQ ID NO: 1336 - protein, 9 aa, Artificial Sequence
  Synthetic
QQSYSTPPS

SEQ ID NO: 1337 - protein, 121 aa, Artificial Sequence
  Synthetic
EVQLLESGGGLVQPGGSLRLSCAASGFTFSSYAMSWVRQAPGKGLEWVSGMSGSGGITYYADSVKGRFTISRDNSKNTLYLQMNSLRAEDTAVYYCAKDTGSMIVELLGYWGQGTLVTVSS

SEQ ID NO: 1338 - protein, 14 aa, Artificial Sequence
  Synthetic
AKDTGSMIVELLGY

SEQ ID NO: 1339 - protein, 107 aa, Artificial Sequence
  Synthetic
DIQMTQSPSSLSASVGDRVTITCRASQSISSYLNWYQQKPGKAPKLLIYAASSLQSGVPSRFSGSGSGTDFTLTISSLQPEDFATYFCQQSYSTPGTFGQGTKVEIK

SEQ ID NO: 1340 - protein, 9 aa, Artificial Sequence
  Synthetic
QQSYSTPGT

SEQ ID NO: 1341 - protein, 120 aa, Artificial Sequence
  Synthetic
EVQLVESGGGLVQPGGSLRLSCAASGFTFSSYDMHWVRQATGKGLEWVSIIGTAGDTYYPGSVKGRFTISRENAKNSLYLQMNSLRAGDTAVYYCARGSYSNYVGYMDVWGKGTTVTVSS

SEQ ID NO: 1342 - protein, 14 aa, Artificial Sequence
  Synthetic
ARGSYSNYVGYMDV

SEQ ID NO: 1343 - protein, 108 aa, Artificial Sequence
  Synthetic
DIQMTQSPSSLSASVGDRVTITCRASQSISSYLNWYQQKPGKAPKLLIYAASSLQSGVPSRFSGSGSGTDFTLTISSLQPEDFATYYCQQSYSTPGLTFGGGTKVEIK

SEQ ID NO: 1344 - protein, 10 aa, Artificial Sequence
  Synthetic
QQSYSTPGLT

SEQ ID NO: 1345 - protein, 121 aa, Artificial Sequence
  Synthetic
EVQLLESGGGLVQPGGSLRLSCAASGFTFSSYAMSWVRQAPGKGLEWVSAISGSGGSTYYADSVKGRFTISRDNSKNTLYLQMNSLRAEDTAVYYCAKDDSSGYHYYFDYWGQGTLVTVSS

SEQ ID NO: 1346 - protein, 14 aa, Artificial Sequence
  Synthetic
AKDDSSGYHYYFDY

SEQ ID NO: 1347 - protein, 108 aa, Artificial Sequence
  Synthetic
DIQMTQSPSSLSASVGDRVTITCRASQSISSYLNWYQQKPGKAPKLLIYAASSLQSGVPSRFSGSGSGTDFTLTISSLQPEDFATYYCQQSYNTPPITFGPGTKVDIK

SEQ ID NO: 1348 - protein, 10 aa, Artificial Sequence
  Synthetic
QQSYNTPPIT

SEQ ID NO: 1349 - protein, 120 aa, Artificial Sequence
  Synthetic
EVQLVESGGGLVQPGGSLRLSCAASGFNFSTHWMHWVRQAPGKGLVWVSRINSDGSRRAYATSVKGRFTISRDNAKNTLYLQMDSLRDEDTAVYYCTRDDSSWPHFFDNWGQGTLVTVSS

SEQ ID NO: 1350 - protein, 13 aa, Artificial Sequence
  Synthetic
TRDDSSWPHFFDN

SEQ ID NO: 1351 - protein, 106 aa, Artificial Sequence
  Synthetic
DIQMTQSPSSLSASVGDRVTITCRASQSISSYLNWYQQKPGKAPKLLIYVASSLQSGVPSRFSGSGSGTDFTLTISSLQPEDFATYYCQQSYSTRTFGQGTKVEIK

SEQ ID NO: 1352 - protein, 8 aa, Artificial Sequence
  Synthetic
QQSYSTRT

SEQ ID NO: 1353 - protein, 120 aa, Artificial Sequence
  Synthetic
QVQLVESGGGVVHPARSLRLSCAASGFTFSSYGMHWVRQTPGKGLEWVAVISYDGSYKDYADSVKGRFTISRDNSKNTLYLQLNSLRAEDTAVYYCARDYGPMVTYHDYWGQGTLVTVSS

SEQ ID NO: 1354 - protein, 13 aa, Artificial Sequence
  Synthetic
ARDYGPMVTYHDY

SEQ ID NO: 1355 - protein, 108 aa, Artificial Sequence
  Synthetic
DIQMTQSPSSLSASVGDRVTITCRASQSISSYLNWYQQKPGKAPKLLFYTASSLQSGVPSRFSGSGSGTDFTLTISSLQPEDFATYYCQQSYSTPPWTFGQGTKVEIK

SEQ ID NO: 1356 - protein, 10 aa, Artificial Sequence
  Synthetic
QQSYSTPPWT

SEQ ID NO: 1357 - protein, 123 aa, Artificial Sequence
  Synthetic
EVQLVESGGGLVQPGGSLRLSCAASGFTFSSYDMHWVRQATGKGLEWVSAIGTAGDTYYPGSVKGRFTISRENAKNSLYLQMNSLRAGDTAVYYCARVGYDSSGYSGWYFDLWGRGTLVTVSS

SEQ ID NO: 1358 - protein, 17 aa, Artificial Sequence
  Synthetic
ARVGYDSSGYSGWYFDL

SEQ ID NO: 1359 - protein, 108 aa, Artificial Sequence
  Synthetic
DIQMTQSPSSLSASVGDRVTITCRASQSISSYLNWYQQKPGKAPKVLIYAASSLQSGVPSRFSGSGSGTDFTLTISSLQPEDFATYYCQQSYSTPPLTFGGGTKVEIK

SEQ ID NO: 1360 - protein, 10 aa, Artificial Sequence
  Synthetic
QQSYSTPPLT

SEQ ID NO: 1361 - protein, 124 aa, Artificial Sequence
  Synthetic
QVQLVESGGGVVQPGRSLRLSCAASGFTFSSYAMHWVRQAPGKGLEWVAVISYDGSNKYSADSVKGRFTISRDNSKNTLYLQMNSLRAEDTAVYYCARDCGGDCYPTTDAFDIWGQGTMVTVSS

SEQ ID NO: 1362 - protein, 17 aa, Artificial Sequence
  Synthetic
ARDCGGDCYPTTDAFDI

SEQ ID NO: 1363 - protein, 107 aa, Artificial Sequence
  Synthetic
DIQMTQSPSSLSASVGDRVTITCRASQSISSYLNWYQQKPGIAPKLLIYAASSLQSGVPSRFSGIGSGTDFTLTISSLQPEDFATYYCQQSYSTPWTFGQGTKVEIK

SEQ ID NO: 1364 - protein, 9 aa, Artificial Sequence
  Synthetic
QQSYSTPWT

SEQ ID NO: 1365 - protein, 122 aa, Artificial Sequence
  Synthetic
QVQLVESGGGVVQPGRSLRLSCAASGFTFSSYAMHWVRQAPGKGLEWVAVISYDGSSKYYADSVKGRFTISRDNSKNTLYLQMNSLRAEDTAVYYCARDHDYGEIVDAFDIWGQGTMVTVSS

SEQ ID NO: 1366 - protein, 15 aa, Artificial Sequence
  Synthetic
ARDHDYGEIVDAFDI

SEQ ID NO: 1367 - protein, 107 aa, Artificial Sequence
  Synthetic
DIQMTQSPSSLSASVGDRVTITCRASQSISSYLNWYQQRPGKAPKLLIYAASSLQSGFPSRFSGSGSGTDFTLTISSLQPEDFATYYCQQSYSTLMYTFGQGTKLEI

SEQ ID NO: 1368 - protein, 10 aa, Artificial Sequence
  Synthetic
QQSYSTLMYT

SEQ ID NO: 1369 - protein, 128 aa, Artificial Sequence
  Synthetic
EVQLVESGGGLVQPGGSLRLSCAASGFTFSSYDMHWVRQVPGKGLEWVSGIGTAGDTYYPGSVKGRFTISREDAKHSLYLQLNSLRDGDTAVYYCARGDHRGSFHTFKTYYYYYMDVWGKGTTVTVSS

SEQ ID NO: 1370 - protein, 22 aa, Artificial Sequence
  Synthetic
ARGDHRGSFHTFKTYYYYYMDV

SEQ ID NO: 1371 - protein, 109 aa, Artificial Sequence
  Synthetic
DIQMTQSPSSLSASVGDRVTITCRASQSISSYLNWYQLKPGKAPKLLIYAASTLHSGVPSRFSGSGSGTEFTLTISSLQPEDFATYYCQQSYSNPPENAFGQGTKLEIE

SEQ ID NO: 1372 - protein, 11 aa, Artificial Sequence
  Synthetic
QQSYSNPPENA

SEQ ID NO: 1373 - protein, 122 aa, Artificial Sequence
  Synthetic
EVQLVESGGGLVQPGGSLRLSCAASGFTFSSYDMHWVRQATGKGLEWVSTIGTAGDTYYPGSVKGRFTISRENAKNSLYLQMNSLRAGDTAVYYCARVGYSSGWAYWYVDLWGRGTLVTVSS

SEQ ID NO: 1374 - protein, 16 aa, Artificial Sequence
  Synthetic
ARVGYSSGWAYWYVDL

SEQ ID NO: 1375 - protein, 108 aa, Artificial Sequence
  Synthetic
DIQMTQSPSSLSASVGDRVTITCRASQSISSFLNWYQQKPGKAPKLLIYAASSLQSGVPSRFSGSGSGTDFTLTISSLQPEDFATYYCQQSYITPQYTFGQGTKVEIK

SEQ ID NO: 1376 - protein, 10 aa, Artificial Sequence
  Synthetic
QQSYITPQYT

SEQ ID NO: 1377 - protein, 127 aa, Artificial Sequence
  Synthetic
EVQLVESGGGLVQPGRSLRLSCAASGFNLDDFAMYWVRQAPGKGLEWVSGISWNSGSIDYADSVKGRFTISRDNARNSLYLEMNSLRAEDTALYFCAKGNQDGYNKRHVYYYGMDVWGQGTTVTVSS

SEQ ID NO: 1378 - protein, 20 aa, Artificial Sequence
  Synthetic
AKGNQDGYNKRHVYYYGMDV

SEQ ID NO: 1379 - protein, 106 aa, Artificial Sequence
  Synthetic
DIQMTQSPSSLSASVGDRVTITCRASQSISSFLNWYQQKPGKAPKLLIYGASSLQSGVPSRFSGSGSGTDFTLTISNLQPEDFATYHCQQSYTTPYTFGQGTKLDI

SEQ ID NO: 1380 - protein, 9 aa, Artificial Sequence
  Synthetic
QQSYTTPYT

SEQ ID NO: 1381 - protein, 120 aa, Artificial Sequence
  Synthetic
QVQLVESGGGVVQPGRSLRLSCAASGFTFNNYGMHWVRQAPGKGLEWVAVIWYDGRSKHYADSVRGRFTISRDNSKNALFLQMNTLRAEDTAMYYCARDEGSLTTTFDSWGQGTLVTVSS

SEQ ID NO: 1382 - protein, 13 aa, Artificial Sequence
  Synthetic
ARDEGSLTTTFDS

SEQ ID NO: 1383 - protein, 107 aa, Artificial Sequence
  Synthetic
DIQMTQSPSSLSASVGDRVTITCRASQSISSHLNWFQQKPGKAPKLLIYAASSLQTGVPSRFSGSGSGTDFTLTITSLQPEDFATYYCQQSYATPPWTFGQGTKVEI

SEQ ID NO: 1384 - protein, 10 aa, Artificial Sequence
  Synthetic
QQSYATPPWT

SEQ ID NO: 1385 - protein, 127 aa, Artificial Sequence
  Synthetic
EVQLVESGGGLVKPGGSLRLSCAASGFSFSDAWMSWVRQAPGKGLEWVGRIKSEIADGTTDYAAPVKGRFTISRDDSRNTLYLQMNSLETEDTAVYYCTTGVVVVVSASPDDAFDVWGQGTMVTVSS

SEQ ID NO: 1386 - protein, 18 aa, Artificial Sequence
  Synthetic
TTGVVVVVSASPDDAFDV

SEQ ID NO: 1387 - protein, 107 aa, Artificial Sequence
  Synthetic
DIQMTQSPSSLSASVGDRVTITCRASQSISDYLNWYQQKPGKAPKLLIYAASSLQSGVPSRFSGSGSGASFTLTVTSLQPEDFATYYCQQSYSTPPTFGQGTKVEIK

SEQ ID NO: 1388 - protein, 9 aa, Artificial Sequence
  Synthetic
QQSYSTPPT

SEQ ID NO: 1389 - protein, 127 aa, Artificial Sequence
  Synthetic
EVQLVESGGGLIKPGGSLRLSCAASGFSFSDAWMTWVRQAPGKGLEWIGRIKSKTDGGTTDYAAPVKGRFTISRDDSKNTLYLQMKSLKTEDTAVYYCATAADIVVVVAPDSPFDCWGQGTLVTVSS

SEQ ID NO: 1390 - protein, 18 aa, Artificial Sequence
  Synthetic
ATAADIVVVVAPDSPFDC

SEQ ID NO: 1391 - protein, 107 aa, Artificial Sequence
  Synthetic
DIQMTQSPSSLSASVGDRVTITCRASQSISYYLNWYQQKPGKAPKLLIYAASSLQSGVPSRFSGSGSGTDFTLTITSLQPEDFATYYCQQSYSTLLTFGGGTKVEIK

SEQ ID NO: 1392 - protein, 9 aa, Artificial Sequence
  Synthetic
QQSYSTLLT

SEQ ID NO: 1393 - protein, 122 aa, Artificial Sequence
  Synthetic
EVQLLESGGGLVQPGGSLRLSCAASGFTFNSYAMSWVRQAPGKGLEWVSGISGSGDSTYYADSVKGRFTISRDNSKNTVYLQMNSLRAEDTAVYYCAKDGGRQWLVELLDYWGHGTLVTVSS

SEQ ID NO: 1394 - protein, 15 aa, Artificial Sequence
  Synthetic
AKDGGRQWLVELLDY

SEQ ID NO: 1395 - protein, 107 aa, Artificial Sequence
  Synthetic
DIQMTQSPSSLSASVGDRVTITCRASQSIASYLNWFQQKPGKAPKLLIYAASSLQSGVPSRFSGSGSGTDFTLTISSLQPEDFATYCCQQSYSSPPTFGQGTKLEIK

SEQ ID NO: 1396 - protein, 9 aa, Artificial Sequence
  Synthetic
QQSYSSPPT

SEQ ID NO: 1397 - protein, 130 aa, Artificial Sequence
  Synthetic
EVQLVESGGGLIQPGGSLRLSCAASGFTFSTSDMHWVRQVIGKGLEWVSVIGSAGDTYYPDSVKGRFTISRENARNSLYLQMNSLRAEDTAVYYCARGRQQLIPDLITSRYNYYYYMDLWGKGTTVIVSS

SEQ ID NO: 1398 - protein, 24 aa, Artificial Sequence
  Synthetic
ARGRQQLIPDLITSRYNYYYYMDL

SEQ ID NO: 1399 - protein, 108 aa, Artificial Sequence
  Synthetic
DIQMTQSPSSLSASVGDRVTITCRASQSIGSYLNWYQQKPGKAPKLLIYAASSLQSGVPSRFSGSGSGTDFTLTISSLQPEDFATYYCQQSYSTLSYTFGQGTKLDIK

SEQ ID NO: 1400 - protein, 10 aa, Artificial Sequence
  Synthetic
QQSYSTLSYT

SEQ ID NO: 1401 - protein, 123 aa, Artificial Sequence; identical to SEQ ID NO: 7
  Synthetic

SEQ ID NO: 1402 - protein, 16 aa, Artificial Sequence
  Synthetic
ARDGSVDTLMVTWFDY

SEQ ID NO: 1403 - protein, 108 aa, Artificial Sequence; identical to SEQ ID NO: 8
  Synthetic

SEQ ID NO: 1404 - protein, 10 aa, Artificial Sequence
  Synthetic
QQSYNTPPWT

SEQ ID NO: 1405 - protein, 125 aa, Artificial Sequence
  Synthetic
QVQLQESGPGLVKPSQTLSLTCTVSGDSISSSGYYWSWIRQHPGKGLESIGYIYYSGTTYYNPSLKSRVTISVDTSKNQLSLKLTSVTAADTAVYYCARDNGGSSGYDWGSLVGWGQGTLVTVSS

SEQ ID NO: 1406 - protein, 17 aa, Artificial Sequence
  Synthetic
ARDNGGSSGYDWGSLVG

SEQ ID NO: 1407 - protein, 107 aa, Artificial Sequence
  Synthetic
DIQMTQSPSSLSASVGDRVTITCRASQSVTRYLFWYQQKPGKAPKLLIYAASSLQSGVPSRFSGSGSGTDFTLTISGLQPEDFATYYCQQSYSTPWTFGQGTKLEIK

SEQ ID NO: 1408 - protein, 9 aa, Artificial Sequence
  Synthetic
QQSYSTPWT

SEQ ID NO: 1409 - protein, 127 aa, Artificial Sequence
  Synthetic
EVQLVESGGGLVKPGGSLRLSCVATGFSFSDAWMNWVRQAPGKGLEWVGRIRSEIADGTTDYAAPVKGRFTISRDDARNTLYLQMNSLEIEDTAVYYCTTGVVVVVSSSPDDAFDVWGQGTMVTVSA

SEQ ID NO: 1410 - protein, 18 aa, Artificial Sequence
  Synthetic
TTGVVVVVSSSPDDAFDV

SEQ ID NO: 1411 - protein, 107 aa, Artificial Sequence
  Synthetic
DIQMTQSPSSLSASVGDRVTITCRASQSIGHYLNWYQQKPGKAPKLLIYAASSLQSGVPSRFSGSGSGAGFTLTVNGLQPEDLATYYCQQYYTTPPTFGQGTKVEMK

SEQ ID NO: 1412 - protein, 9 aa, Artificial Sequence
  Synthetic
QQYYTTPPT

SEQ ID NO: 1413 - protein, 119 aa, Artificial Sequence
  Synthetic
EVQLVESGGGLVQPGGSLRLSCAASGFTFSTYDMHWVRQTPGKGLEWVAAIGTAGDTYYADSVKGRFTISRQNAKNSLYLQMNSLRVGDTAVYYCARGIVETTMAFDSWGQGTLVTVSS

SEQ ID NO: 1414 - protein, 13 aa, Artificial Sequence
  Synthetic
ARGIVETTMAFDS

SEQ ID NO: 1415 - protein, 108 aa, Artificial Sequence
  Synthetic
DIQMTQSPSSLSASVGDRVTITCRASQPIRNYLSWYQQKPGKAPKILIYGASSLQSGVPSRFSGSGSGTDFTLTISSLQPDDFATYYCQQSYSNPTVTFGGGTKVEIK

SEQ ID NO: 1416 - protein, 10 aa, Artificial Sequence
  Synthetic
QQSYSNPTVT

SEQ ID NO: 1417 - protein, 126 aa, Artificial Sequence
  Synthetic
QVQLVQSGAEVKKPGASVKVSCKASGYTFTSYGINWVRQAPGQGLEWMGWISAFNGDTNYAQKVQGRVTMTTDTSTNTVYMELRSLRSDDTAVYYCARDEYYYESGASSADIGHIWGQGTVVTVSS

SEQ ID NO: 1418 - protein, 19 aa, Artificial Sequence
  Synthetic
ARDEYYYESGASSADIGHI

SEQ ID NO: 1419 - protein, 109 aa, Artificial Sequence
  Synthetic
DIQMTQSPSSLSASVGDRVTITCRASQGIRNHLGWFQQKPGEAPKRLIYAASSLQTGVPSRFSGSGSGTQFTLTIASLQPEDFATYYCLHHDDFPPRFTFGPGTKVNVK

SEQ ID NO: 1420 - protein, 11 aa, Artificial Sequence
  Synthetic
LHHDDFPPRFT

SEQ ID NO: 1421 - protein, 117 aa, Artificial Sequence
  Synthetic
EVQLVESGGGLIQPGGSLRLSCAASGFIVSSNYMSWLRQAPGKGLEWVSVIYPGGSTFYADSVKGRFTVSRDSANNTLFLQMSGLRAEDTAVYYCARDWGDWYFDFWGQGTLVTVSS

SEQ ID NO: 1422 - protein, 11 aa, Artificial Sequence
  Synthetic
ARDWGDWYFDF

SEQ ID NO: 1423 - protein, 107 aa, Artificial Sequence
  Synthetic
DIQMTQSPSSLSASVGDRVTITCRASQGISNSLAWYQQKPGKAPKLLLYAASTLENGVPSRFSGTGSGTDYTLTISSLQPEDFATYYCQHYYSSPRTFGQGTKVEIK

SEQ ID NO: 1424 - protein, 9 aa, Artificial Sequence
  Synthetic
QHYYSSPRT

SEQ ID NO: 1425 - protein, 117 aa, Artificial Sequence
  Synthetic
EVQLVESGGGLIQPGGSLRLSCAASGFTVSSNYMSWVRQAPGKGLEWVSVIYSGGSTYYADSVKGRFTISRDNSKNTLYLQMNSLRAEDTAVYYCARDYGDFYFDYWGQGTLVTVSS

SEQ ID NO: 1426 - protein, 11 aa, Artificial Sequence
  Synthetic
ARDYGDFYFDY

SEQ ID NO: 1427 - protein, 107 aa, Artificial Sequence
  Synthetic
DIQMTQSPSSLSASVGDRVTITCRASQGISNSLAWYQQKPGKAPKLLLYAASRLESGVPSRFSGSGSGTDYTLTINSLQPEDFATFYCQQYYSTPRTFGQGTKVEIK

SEQ ID NO: 1428 - protein, 9 aa, Artificial Sequence
  Synthetic
QQYYSTPRT

SEQ ID NO: 1429 - protein, 124 aa, Artificial Sequence
  Synthetic
EVQLVESGGGLVQPGGSLRLSCAVSGFTLNNDDMHWVRQAPGKGLEWVSVIGSSGDTYYSDSVKGRFTISRESAKNVLYLQMNSLRAGDTAVYYCARGAAATGSRHFYYYMDVWGKGTTVVVSS

SEQ ID NO: 1430 - protein, 18 aa, Artificial Sequence
  Synthetic
ARGAAATGSRHFYYYMDV

SEQ ID NO: 1431 - protein, 108 aa, Artificial Sequence
  Synthetic
DIQMTQSPSSLSASVGDRVTITCRASQTIGSYLNWYQQKPGKGPKLLIYAASSLHSGVPSRFSGSGSGTEFTLTITSLQPEDYATYYCQQSYVMPAWTFGQGTKVEIK

SEQ ID NO: 1432 - protein, 10 aa, Artificial Sequence
  Synthetic
QQSYVMPAWT

SEQ ID NO: 1433 - protein, 127 aa, Artificial Sequence; identical to SEQ ID NO: 37
  Synthetic

SEQ ID NO: 1434 - protein, 20 aa, Artificial Sequence
  Synthetic
ARDATMITLVRGIMGPPFDH

SEQ ID NO: 1435 - protein, 106 aa, Artificial Sequence; identical to SEQ ID NO: 38
  Synthetic

SEQ ID NO: 1436 - protein, 9 aa, Artificial Sequence
  Synthetic
QQYDNFPPD

SEQ ID NO: 1437 - protein, 120 aa, Artificial Sequence
  Synthetic
EVQLVESGGGLVQPGGSLRLSCAASGFTFSTYDMHWVRQATGKGLEWVSAIGTSGDTYYPDSVKGRFTISRENAKNSLFLQMNGLRAGDTAIYYCARGNWNPPSYYYMDVWGKGTTVTVS

SEQ ID NO: 1438 - protein, 15 aa, Artificial Sequence
  Synthetic
ARGNWNPPSYYYMDV

SEQ ID NO: 1439 - protein, 108 aa, Artificial Sequence
  Synthetic
DIQMTQSPSSLSASVGDRVTISCRASQSINTYLNWYQQRPGKAPKLLIYASSSLQSGVPSRFSGSGSGTDFTLTISSLQPEDFATYYCQQSYSTPPWTFSQGTKVEIK

SEQ ID NO: 1440 - protein, 10 aa, Artificial Sequence
  Synthetic
QQSYSTPPWT

SEQ ID NO: 1441 - protein, 124 aa, Artificial Sequence
  Synthetic
QVQLVESGGGVVQPGRSLRLSCVASGFSFSKYGMHWVRQAPGKGLEWVAVVSYDGSNKYYADSVKGRIAVSRDNSKNTLFLQMNSLKAEDTAVYYCAKGGLYGSGTYYENFDYWGQGTRVTVSS

SEQ ID NO: 1442 - protein, 17 aa, Artificial Sequence
  Synthetic
AKGGLYGSGTYYENFDY

SEQ ID NO: 1443 - protein, 107 aa, Artificial Sequence
  Synthetic
DIQMTQSPSSLSASVGDRVTIICQASQDITYYLNWFQQKPGKPPKLLIHDASNLEAGVPSRFSGGGSGTDFTFTISSLQPEDFATYYCQQYEHLPYTFGQGTRLEIK

SEQ ID NO: 1444 - protein, 9 aa, Artificial Sequence
  Synthetic
QQYEHLPYT

SEQ ID NO: 1445 - protein, 122 aa, Artificial Sequence
  Synthetic
EVQLVESGGGLVQPDRSLRLSCAASGFTFDDYAMHWVRQAPGKGLEWVSGISRNSGIKVYADSVKGRFTISRDNAKNSLFLQMNSLRAEDTALYYCVKEIGLELPVDVFDFWGQGTMVTVSS

SEQ ID NO: 1446 - protein, 15 aa, Artificial Sequence
  Synthetic
VKEIGLELPVDVFDF

SEQ ID NO: 1447 - protein, 107 aa, Artificial Sequence
  Synthetic
DIQMTQSPSSLSASVGDRVTLTCRASQSISRYLNWFQQKAGKAPKLLIYAASSLQTGVPSRFSGSGSGTDFTLTISSLQLEDFATYYCQQSYSTPVTFGQGTRLEIK

SEQ ID NO: 1448 - protein, 9 aa, Artificial Sequence
  Synthetic
QQSYSTPVT

SEQ ID NO: 1449 - protein, 120 aa, Artificial Sequence
  Synthetic
QVQLVESGGGVVQPGGSLRLSCGASGFTFSSYAMHWVRQAPGEGLEWVAVILYDGAGKFYADSVKGRFTISRDNSKNTLYLQMNSLRAEDTAVYYCARDYGDYVTHFDYWGQGALVTVSP

SEQ ID NO: 1450 - protein, 13 aa, Artificial Sequence
  Synthetic
ARDYGDYVTHFDY

SEQ ID NO: 1451 - protein, 108 aa, Artificial Sequence; identical to SEQ ID NO: 22
  Synthetic

SEQ ID NO: 1452 - protein, 10 aa, Artificial Sequence
  Synthetic
QQSYNTPPWT

SEQ ID NO: 1453 - protein, 120 aa, Artificial Sequence; identical to SEQ ID NO: 19
  Synthetic

SEQ ID NO: 1454 - protein, 13 aa, Artificial Sequence
  Synthetic
ARDQGTATTYFDH

SEQ ID NO: 1455 - protein, 108 aa, Artificial Sequence
  Synthetic
DIQMTQSPSSLSASVGDRVTITCRASQSIRTFLSWYQQKAGKAPKLLIYTASSLQNGVPSRFSGSGSGTDFTLTISSLQPEDFATYYCQQSYETPPWTFGQGTKVEVK

SEQ ID NO: 1456 - protein, 10 aa, Artificial Sequence
  Synthetic
QQSYETPPWT

SEQ ID NO: 1457 - protein, 120 aa, Artificial Sequence
  Synthetic
EVQLLESGGGLVQPGGSLRLSCAASRFTFSRYAMSWVRQAPGKGLEWVSGISGSGDRTYYADSVKGRFTISRDNSKNTLLLQMNSLRAEDTAVYYCAKDDFWNPQRGAYWGQGTLVTVSS

SEQ ID NO: 1458 - protein, 13 aa, Artificial Sequence
  Synthetic
AKDDFWNPQRGAY

SEQ ID NO: 1459 - protein, 107 aa, Artificial Sequence
  Synthetic
DIQMTQSPSSLSASVGDRVAITCQASQDISNYLNWYQHKPGKAPKLLIYDASNLEAGVPSRFSGSGSGTDFAFTISSLQPEDIATYYCQQFDNLSLTFGGGTKVEIK

SEQ ID NO: 1460 - protein, 9 aa, Artificial Sequence
  Synthetic
QQFDNLSLT

SEQ ID NO: 1461 - protein, 120 aa, Artificial Sequence
  Synthetic
QVQLVESGGGVVQPGRSLRLSCAASGFTFSDYAMHWVRQAPGKGLEWVAVIWDDGRTKHYADSVKGRFTISRDKAKNTLYLQMNSLRAEDTAIYYCARDWGTLTTLFDYWGQGALVTVSS

SEQ ID NO: 1462 - protein, 13 aa, Artificial Sequence
  Synthetic
ARDWGTLTTLFDY

SEQ ID NO: 1463 - protein, 108 aa, Artificial Sequence
  Synthetic
DIQMTQSPSSLSASVGDRVTITCRASQTIISHLNWYQQKPGKAPNLLIYAASSLQSGVPSRFSGSGSGTDFTLTISSLQPEDFATYYCQQSYSTPPWTFGQGTKVEIK

SEQ ID NO: 1464 - protein, 10 aa, Artificial Sequence
  Synthetic
QQSYSTPPWT

SEQ ID NO: 1465 - protein, 122 aa, Artificial Sequence
  Synthetic
QVQLVQSGAEVKKPGASVKVSCKASGYTFTSYGFSWVRQAPGQGLEWMGWISGNDGKTHYAQKFQGRVTMTTDTSTSTAYMELRSLESDDTAVYYCARDCSGARCYDYSFDYWGQGTLVTAS

SEQ ID NO: 1466 - protein, 16 aa, Artificial Sequence
  Synthetic
ARDCSGARCYDYSFDY

SEQ ID NO: 1467 - protein, 106 aa, Artificial Sequence
  Synthetic
DIQMTQSPSSLSASVGDRVTIACRTSQTVHTYLNWYQQKPGKAPKLLIYAASSLQSGVPSRFGGSGSGTDFTLTISSLQPEDFATYYCQQSFVSRTFGQGTKVEIK

SEQ ID NO: 1468 - protein, 8 aa, Artificial Sequence
  Synthetic
QQSFVSRT

SEQ ID NO: 1469 - protein, 127 aa, Artificial Sequence; identical to SEQ ID NO: 13
  Synthetic

SEQ ID NO: 1470 - protein, 20 aa, Artificial Sequence
  Synthetic
AKQIGEYCSGGNCYQGSLDY

SEQ ID NO: 1471 - protein, 107 aa, Artificial Sequence; identical to SEQ ID NO: 14
  Synthetic

SEQ ID NO: 1472 - protein, 9 aa, Artificial Sequence
  Synthetic
QQYDIVPFT

SEQ ID NO: 1473 - protein, 122 aa, Artificial Sequence
  Synthetic
EVQLLESGGGLVQPGGSLRLSCAASGFTFSSYVMSWVRQAPGKGLEWVSEISGSGDITDYADSVKGRFTISRDNSKKTLYLQMKSLRAEDTAVYYCARDSQLIDMVVVLDYWGQGTLVTVSS

SEQ ID NO: 1474 - protein, 15 aa, Artificial Sequence
  Synthetic
ARDSQLIDMVVVLDY

SEQ ID NO: 1475 - protein, 104 aa, Artificial Sequence
  Synthetic
  misc_feature (50)..(50): Xaa can be any naturally occurring amino acid
DIQMTQSPSSLSASVGDRVTITCRTSQTISNYLNWFQQKPGKAPKLLIYXVSSLRSGVPSRFSGSGSGTDFTLTISSLQPEDFATYYCQQTYTTPPTFGGGTKV

SEQ ID NO: 1476 - protein, 9 aa, Artificial Sequence
  Synthetic
QQTYTTPPT

SEQ ID NO: 1477 - protein, 122 aa, Artificial Sequence
  Synthetic
EVQLVESGGGLVQPGGSLRLSCAASGFTFSSDDMHWVRQVTGRGLEWVSGIGTSGDRYYVDSVKGRFTISREDAKNTLYLQMNSLRAGDTAVYYCARGRADSSGLYYFFDYWGQGTLVTVSS

SEQ ID NO: 1478 - protein, 16 aa, Artificial Sequence
  Synthetic
ARGRADSSGLYYFFDY

SEQ ID NO: 1479 - protein, 108 aa, Artificial Sequence
  Synthetic
DIQMTQSPSSLSASVGDRVTITCRASQTIGTYLNWYQQKVGKGPKLLIFAASRLQSGVPSRFSGSGSGTDFTLTITSLQPEDFATYYCQQSYSTSRYTFGQGTKLEIK

SEQ ID NO: 1480 - protein, 10 aa, Artificial Sequence
  Synthetic
QQSYSTSRYT

SEQ ID NO: 1481 - protein, 127 aa, Artificial Sequence
  Synthetic
QVQLVESGGGVVPPGRSLRLSCAASGFTFSNYAIHWVRQAPGKGLEWVADISHDGTKKYYADSVKGRFTISRDNSKNTLYLQLASLVPEDAAIYYCAKDQRPGDVWRSYYSFGMDVWGQGATVVVSS

SEQ ID NO: 1482 - protein, 20 aa, Artificial Sequence
  Synthetic
AKDQRPGDVWRSYYSFGMDV

SEQ ID NO: 1483 - protein, 107 aa, Artificial Sequence
  Synthetic
DIQMTQSPSSLSASVGDRLTITCRAGQSINTYLNWYQQRPGQAPKLLIYAASTLQSGVPSRFSGSGSEADFTLTISSLQPEDFATYYCQQSYNTPPTFGGGTKVEIK

SEQ ID NO: 1484 - protein, 9 aa, Artificial Sequence
  Synthetic
QQSYNTPPT

SEQ ID NO: 1485 - protein, 120 aa, Artificial Sequence
  Synthetic
EVQLVESGGGLVQPGGSLRLSCAASGFTFNSYDMHWVRQITGKGLEWVSAIGTSGDTYYLDSVKGRFTISRQNAENSVYLQMESLRAGDTAVYYCARGGLQLPHWYYDLWGRGTLVTVSS

SEQ ID NO: 1486 - protein, 14 aa, Artificial Sequence
  Synthetic
ARGGLQLPHWYYDL

SEQ ID NO: 1487 - protein, 108 aa, Artificial Sequence
  Synthetic
DIQMTQSPSSLSASVGDRVTITCRASQSISTYLNWYQQKPGKAPYLLIYSVSRLQSGVPSRFSGSGSGTHFTLTISSLQPEDFATYFCQQSYTMPPITFGQGTRLEIK

SEQ ID NO: 1488 - protein, 10 aa, Artificial Sequence
  Synthetic
QQSYTMPPIT

SEQ ID NO: 1489 - protein, 123 aa, Artificial Sequence
  Synthetic
EVQLVESGGGLVKPGGSLRLSCAASGFTFSSYSMNWVRQAPGKGLAWVSSISSSNNIIYYADSVKGRFTISRDDAKDSLYLHMKSLRADDTAVYFCARVPSWAPYQLLPGPFDYWGQGILVTV

SEQ ID NO: 1490 - protein, 18 aa, Artificial Sequence
  Synthetic
ARVPSWAPYQLLPGPFDY

SEQ ID NO: 1491 - protein, 107 aa, Artificial Sequence
  Synthetic
DIQMTQSPSSLSASVGDRVTITCQASQAIASYLSWYQHKPGRAPKLLIYDASNLEIGVPSRFSGSGSGTDFTFTISSLQSEDNATYYCQQYESLPGTFGGGTKVEIK

SEQ ID NO: 1492 - protein, 9 aa, Artificial Sequence
  Synthetic
QQYESLPGT

SEQ ID NO: 1493 - protein, 121 aa, Artificial Sequence
  Synthetic
EVQLVESGGGLVQPGGSLRLSCAASGFTFSRYDMYWVRQATGKGLEWVSTIGTSGDTYYADSVKGRFTISRDNAKNSFFLQMNSLTAGDTAIYYCARDSGISWYPNMLDVWGQGTTVTVSS

SEQ ID NO: 1494 - protein, 15 aa, Artificial Sequence
  Synthetic
ARDSGISWYPNMLDV

SEQ ID NO: 1495 - protein, 108 aa, Artificial Sequence
  Synthetic
DIQMTQSPSSLSASVGDRVTITCRASQSIGNYLNWYQQNPGKGPKLLIYGASTLQSGVPSRFSGSGSGTDFSLTISSLQPEDFATYYCQQTYSIPPVTFGQGTRLEIK

SEQ ID NO: 1496 - protein, 10 aa, Artificial Sequence
  Synthetic
QQTYSIPPVT

SEQ ID NO: 1497 - protein, 122 aa, Artificial Sequence
  Synthetic
QVQLQESGPGLVKPSETLSLTCTVSGVSISSYYWGWIRQPAGKGLEWIGLIYTSGTTNYNPSLKSRLTLSVDTSKKQFSLRLRSVTAADTAVYYCARGSALNWNSLGYFDYWDQGTLVTVSS

SEQ ID NO: 1498 - protein, 16 aa, Artificial Sequence
  Synthetic
ARGSALNWNSLGYFDY

SEQ ID NO: 1499 - protein, 107 aa, Artificial Sequence
  Synthetic
DIQMTQSPSSLSASVGDRVTITCQASQDISNFLNWYQQKPGKAPKLLIYDASTLETGVPSKFSGSGSGTHFTFTISSLQPEDIATYYCQHYDSLPLTFGGGTKVEIK

SEQ ID NO: 1500 - protein, 9 aa, Artificial Sequence
  Synthetic
QHYDSLPLT

SEQ ID NO: 1501 - protein, 124 aa, Artificial Sequence
  Synthetic
EVQLVESGGGLVQPGGSLRLSCAASGFTFSNDDMHWVRQVTGKGLEWISVIGAAGDTYYADSVKGRFTISRENAKSSLFLQMNSLRAGDTAVYYCVRGDHTNYGASYYYYMDVWGKGTTVTVSS

SEQ ID NO: 1502 - protein, 18 aa, Artificial Sequence
  Synthetic
VRGDHTNYGASYYYYMDV

SEQ ID NO: 1503 - protein, 108 aa, Artificial Sequence
  Synthetic
DIQMTQSPSSLSASVGDRVTVTCRASQSISRYLNWYQQRPGKAPKLLIYAASSLQSGVPSRFSGSGSGTDFTLTISSLQPEDFATYYCQQSYVSPSWTFGQGTKVEIK

SEQ ID NO: 1504 - protein, 10 aa, Artificial Sequence
  Synthetic
QQSYVSPSWT

SEQ ID NO: 1505 - protein, 124 aa, Artificial Sequence
  Synthetic
EVQLVESGGGLVQPGGSLRLSCAASGFTFNDFYMNWIRQPPGQAPEWLGVIRNKGNGYTTEVNTSVKGRFTISRDNTQNILYLQMNSLRAEDTAIYYCARGGPYYYSGDDAPYWGQGVMVTVSS

SEQ ID NO: 1506 - protein, 15 aa, Artificial Sequence
  Synthetic
ARGGPYYYSGDDAPY

SEQ ID NO: 1507 - protein, 108 aa, Artificial Sequence
  Synthetic
DIQMTQSPSSLSASVGDRVTITCRASQAIRNYLNWYQQKPGQAPELLIYAASSLQSGVPSRFSGSGSGTDFTLTISSLQPEDFATYYCQQSYSTPPATFGQGTKLEIK

SEQ ID NO: 1508 - protein, 10 aa, Artificial Sequence
  Synthetic
QQSYSTPPAT

SEQ ID NO: 1509 - protein, 124 aa, Artificial Sequence
  Synthetic
QVQLQESGPGLVKPSQTLSLTCTVSGASISSSEHYWSWIRQPPGKGLEWIGYISYSGGTYQNPSLQSRMTLSMDASKNQFSLKLSSVTAADTAVYFCARLNTMIVMINGVFDVWGQGTMLTVSS

SEQ ID NO: 1510 - protein, 16 aa, Artificial Sequence
  Synthetic
ARLNTMIVMINGVFDV

SEQ ID NO: 1511 - protein, 108 aa, Artificial Sequence
  Synthetic
DIQMTQSPSSLSAFVGDRVTITCQASQDINKYVNWYQQKPGKAPKLLIYDASNLQTGVPSRFSGSGSGTHFTFTISSLQPEDFATYYCQEYDNLFSISFGQGTRLEMK

SEQ ID NO: 1512 - protein, 10 aa, Artificial Sequence
  Synthetic
QEYDNLFSIS

SEQ ID NO: 1513 - protein, 122 aa, Artificial Sequence
  Synthetic
EVQLVESGGGLVQPGGSLRLSCAASGFTFSNYDMHWVRQPTGKGLEWVSAIGTSGDTYYPESVKGRFTISRENARNSVYLQMNSLRAGDTAVYYCARVNFDSSNYKSWFDSWGQGTLVTVSP

SEQ ID NO: 1514 - protein, 16 aa, Artificial Sequence
  Synthetic
ARVNFDSSNYKSWFDS

SEQ ID NO: 1515 - protein, 108 aa, Artificial Sequence
  Synthetic
DIQMTQSPSSLSASVGDRVTITCRASQRISNYLNWYQQKPGKAPKLLIYAASTLQSGVPSRFSGSGSGTDFTLTISSLQPEDFATYYCQQSYATPPWTFGQGTKVEIK

SEQ ID NO: 1516 - protein, 10 aa, Artificial Sequence
  Synthetic
QQSYATPPWT

SEQ ID NO: 1517 - protein, 121 aa, Artificial Sequence
  Synthetic
QVQLVESGGGVVQPGRSLRLSCAASGFTFSNYAIHWVRQAPGKGLEWVAVISYDGSNKYYADSVKGRFTISRDNSKNTLYLQMNSLRAEDTAVYYCARDFDDSSFWAFDYWGQGTLVTVSS

SEQ ID NO: 1518 - protein, 14 aa, Artificial Sequence
  Synthetic
ARDFDDSSFWAFDY

SEQ ID NO: 1519 - protein, 108 aa, Artificial Sequence
  Synthetic
DIQMTQSPSSLSASVGDRVTITCRASQSIRSYLNWYQQKPGKAPKLLIYAASSLQSGVPSRFSGSGSGTDFTLTISSLQPDDFATYYCQQSYSTPPATFGQGTKLEIK

SEQ ID NO: 1520 - protein, 10 aa, Artificial Sequence
  Synthetic
QQSYSTPPAT

SEQ ID NO: 1521 - protein, 123 aa, Artificial Sequence
  Synthetic
QVQLVESGGGVVQPGRSLRLSCAASGFTYSGYAMHWVRQAPGKGLEWVAVILDDGSNKYYADSVKGRFTISRDNSKNTLYLQMNSLRAEDTAVYYCARDGIVDTAMVTWFDYWGQGTLVTVSS

SEQ ID NO: 1522 - protein, 16 aa, Artificial Sequence
  Synthetic
ARDGIVDTAMVTWFDY

SEQ ID NO: 1523 - protein, 108 aa, Artificial Sequence
  Synthetic
DIQMTQSPSSLSASVGDRVTITCRASQSISSYLNWYHQKPGKAPKLLIYTASSLQSGVPSRFSGSGSGTDFTLTISSLQPEDFATYYCQQSYSTPPWTFGQGTKVEIK

SEQ ID NO: 1524 - protein, 10 aa, Artificial Sequence
  Synthetic
QQSYSTPPWT

SEQ ID NO: 1525 - protein, 125 aa, Artificial Sequence; identical to SEQ ID NO: 29
  Synthetic

SEQ ID NO: 1526 - protein, 17 aa, Artificial Sequence
  Synthetic
ARRGGRTPVRFNYGGDV

SEQ ID NO: 1527 - protein, 106 aa, Artificial Sequence
  Synthetic
DIQMTQSPSSLSASVGDRVTITCQASQDISRYLNWFQHKPGKAPKLLIYDASNLEAGVPSRFTGSGSGTEFTFTISSLQPEDFAIYFCQQYDSLPLTFGGGTTVEI

SEQ ID NO: 1528 - protein, 9 aa, Artificial Sequence
  Synthetic
QQYDSLPLT

SEQ ID NO: 1529 - protein, 121 aa, Artificial Sequence
  Synthetic
QVQLVQSGAEVKKPGSSVKVSCKASGDTFSSHAINWVRQAPGQGLEWMGRSIPMLGVTTSAQKFKGRVTITADHSTSTVFMDLSSLRSDDTAIYYCARGVVGATPGSFDLWGQGTMVTVSS

SEQ ID NO: 1530 - protein, 14 aa, Artificial Sequence
  Synthetic
ARGVVGATPGSFDL

SEQ ID NO: 1531 - protein, 107 aa, Artificial Sequence
  Synthetic
DIQMTQSPSSLSASVGDRVTITCRASQSISRYLNWYQQRPGRAPELLIYSASSLQSGVPSRFSASGSGTDFTLTISSLQPEDFATYYCQQSYETPPITFGQGTRLEI

SEQ ID NO: 1532 - protein, 10 aa, Artificial Sequence
  Synthetic
QQSYETPPIT

SEQ ID NO: 1533 - protein, 122 aa, Artificial Sequence
  Synthetic
QVQLQESGPGLVKPSETLSLICSVSGSSISSFYWGWIRQPAGKGLEWLGLIYSSGSTNYNPSLKSRVTLSVDTSTKQFSLRLSSVTAADTAVYYCVRGSALNWNSLGYFDYWGQGTLVTVSA

SEQ ID NO: 1534 - protein, 16 aa, Artificial Sequence
  Synthetic
VRGSALNWNSLGYFDY

SEQ ID NO: 1535 - protein, 107 aa, Artificial Sequence
  Synthetic
DIQMTQSPSSLSASVGDRVTITCQASQDISNYLNWYQQKPGKAPKLLIYDASNLETGVPSRFSGSGSGTYFTFTISSLQPEDSATYYCQQYDNLPLTFGGGTKVEIK

SEQ ID NO: 1536 - protein, 9 aa, Artificial Sequence
  Synthetic
QQYDNLPLT

SEQ ID NO: 1537 - protein, 120 aa, Artificial Sequence
  Synthetic
QVQLVESGGGVVQPGRSLRLSCAASGFTFSSYGLHWVRQAPGKGLEWAAVISDDGSYRDYADSVKGRFTISRDNSRNTLYLQMNSLRAEDTAVYYCARDYGDYVTHFDYWGQGTLVTVSS

SEQ ID NO: 1538 - protein, 13 aa, Artificial Sequence
  Synthetic
ARDYGDYVTHFDY

SEQ ID NO: 1539 - protein, 108 aa, Artificial Sequence
  Synthetic
DIQMTQSPSSLFASVGDRVTITCRASQSINSYLNWYQQKPGKAPKLLIYVASSLQSGVPSRFSGSGSGTDFTLTISSLQPEDFATYYCQQSYNTPPWTFGQGTKVEIK

SEQ ID NO: 1540 - protein, 10 aa, Artificial Sequence
  Synthetic
QQSYNTPPWT

SEQ ID NO: 1541 - protein, 125 aa, Artificial Sequence
  Synthetic
QVQLVESGGGVVQPGRSLRLSCAASGFTFSSYGIHWVRQAPGKGLEWVAVIWYDGSNKYYADSVKGRFTISRDNSKNTLYLQMNSLRAEDTAVYYCARDGTSITLITEGDAFDIWGQGTMVTVSS

SEQ ID NO: 1542 - protein, 18 aa, Artificial Sequence
  Synthetic
ARDGTSITLITEGDAFDI

SEQ ID NO: 1543 - protein, 107 aa, Artificial Sequence
  Synthetic
DIQMTQSPSSVSASVGDRVTITCRASQGISSWLAWYQQKPGKAPKLLIYAASSLQSGVPSRFSGSGSGTDFTLTISSLQPEDFATYYCQQANSLPLTFGGGTKVEIK

SEQ ID NO: 1544 - protein, 9 aa, Artificial Sequence
  Synthetic
QQANSLPLT

SEQ ID NO: 1545 - protein, 115 aa, Artificial Sequence
  Synthetic
EVQLVESGGGLIQPGGSLRVSCAASGVTVSSNYMTWVRQGPGKGLEWVSVIYPGGNTFYADSVKGRFTISRDTSKNTLSLQMNSLRVEDTAVYYCARDLGERGMDVWGHGTTVTV

SEQ ID NO: 1546 - protein, 11 aa, Artificial Sequence
  Synthetic
ARDLGERGMDV

SEQ ID NO: 1547 - protein, 106 aa, Artificial Sequence
  Synthetic
DIQMTQSPSSVSASVGDRVTITCRASQGFGNWLAWYQQKPGKAPKLLIYAASNLQSGVPSRFSGSGSGTDFTLTISSLQAEDFATYFCQQANSFPSFGGGTKVEIK

SEQ ID NO: 1548 - protein, 8 aa, Artificial Sequence
  Synthetic
QQANSFPS

SEQ ID NO: 1549 - protein, 121 aa, Artificial Sequence
  Synthetic
EVQLVESGGGLIQPGRSLRLSCAASGFTFDDYAMHWVRQRPGEALEWVSSISWNSASIGYADSARGRFTISRDNSKNSLYLEMNSLRAEDTALYYCAKGGELPWADAFDIWGQGTVVTVSS

SEQ ID NO: 1550 - protein, 14 aa, Artificial Sequence
  Synthetic
AKGGELPWADAFDI

SEQ ID NO: 1551 - protein, 107 aa, Artificial Sequence
  Synthetic
DIQMTQSPSSVSASVGDRVTLTCRASQGISSWLAWYQQKPGKAPKLLIYGASSLQSGVPSRFSGSGYETDFTLTISSLQPEDFATYYCQQADSFPLTFGGGTKVEIK

SEQ ID NO: 1552 - protein, 9 aa, Artificial Sequence
  Synthetic
QQADSFPLT

SEQ ID NO: 1553 - protein, 126 aa, Artificial Sequence
  Synthetic
EVQLVESGGGLVQPGGSLRLSCAASGFSFSTYWMSWVRQAPGKGLEWVADIKQDGSEKYFVDSVKGRFTISRDNAKNSLYLHLNSLRAEDTAVYYCAREMAGSGNYYWFGYGMDVWGQGTTVTVSS

SEQ ID NO: 1554 - protein, 19 aa, Artificial Sequence
  Synthetic
AREMAGSGNYYWFGYGMDV

SEQ ID NO: 1555 - protein, 107 aa, Artificial Sequence
  Synthetic
DIQMTQSPSSVSASVGDRVTITCRASQGISSWLAWYQQKPGKAPKLLIYAASSLQSGVPSRFSGSESGTDFTLTISSLQPEDFATYYCQQANSFPLTFGGGTKVEIK

SEQ ID NO: 1556 - protein, 9 aa, Artificial Sequence
  Synthetic
QQANSFPLT

SEQ ID NO: 1557 - protein, 120 aa, Artificial Sequence; identical to SEQ ID NO: 59
  Synthetic

SEQ ID NO: 1558 - protein, 13 aa, Artificial Sequence
  Synthetic
GKQINEWSHFLDY

SEQ ID NO: 1559 - protein, 107 aa, Artificial Sequence
  Synthetic
DIQMTQSPSSVSASVGDRVTITCRASQGISNWLAWYQKKPGKAPKLLIYATSSLQSGVPSRFSGSGSETDFTLTIRSLQPEDFATYYCQQANSYPLTFGQGTRLEIK

SEQ ID NO: 1560 - protein, 9 aa, Artificial Sequence
  Synthetic
QQANSYPLT

SEQ ID NO: 1561 - protein, 120 aa, Artificial Sequence
  Synthetic
EVQLVESGGGLIQPGRSLRLSCAASGFTFDDYGMHWVRQAPGKGLEWVSGISWNSASIGYADSVKGRFTISRDNAKNSLYLQMNSLRREDTALYYCAKDVQYNWNYFETWGQGILVTVSS

SEQ ID NO: 1562 - protein, 13 aa, Artificial Sequence
  Synthetic
AKDVQYNWNYFET

SEQ ID NO: 1563 - protein, 107 aa, Artificial Sequence
  Synthetic
DIQMTQSPSSVSASVGDRVTITCRASQGFGSWVAWYQQKPGRAPKLLIYAESRLQSGVPSRFSGSGSGTDFTLTISSLQPEDFATYYCQQANSFPLTFGGGTRVEIK

SEQ ID NO: 1564 - protein, 9 aa, Artificial Sequence
  Synthetic
QQANSFPLT

SEQ ID NO: 1565 - protein, 120 aa, Artificial Sequence
  Synthetic
EVQLVQSGAEVKKPGESLKISCQGSGYRFTNYWIAWVRQMPGKGLEWMGIIYPGDSDTRYSPSFQGQVTISADKSSNTAYLQWSSLKASDTAMYYCARRERWLQEPFDYWGQGTLVIVSS

SEQ ID NO: 1566 - protein, 13 aa, Artificial Sequence
  Synthetic
ARRERWLQEPFDY

SEQ ID NO: 1567 - protein, 107 aa, Artificial Sequence
  Synthetic
DIQMTQSPSTLAASIGDRVTITCRASQSVSRWLAWYQQKPGKAPKLLIYEASSLTTGVPSRFSGSGSGTEFTLTISSLQPDDFATYYCQHYDDYPYTFGQGTKLEIK

SEQ ID NO: 1568 - protein, 9 aa, Artificial Sequence
  Synthetic
QHYDDYPYT

SEQ ID NO: 1569 - protein, 120 aa, Artificial Sequence
  Synthetic
QVQLVESGGGVVQPGRSLRLSCAASGFTFSSYGMHWVRQAPGKGLEWVTVISYDGRNKYYADSVKGRFTISRDNSKNTLYLQMNSLRAEDTAVYYCAREFGDPEWYFDYWGQGTLVTVSS

SEQ ID NO: 1570 - protein, 13 aa, Artificial Sequence
  Synthetic
AREFGDPEWYFDY

SEQ ID NO: 1571 - protein, 106 aa, Artificial Sequence
  Synthetic
DIQMTQSPSTLSASVGDRVTITCRANQSISSWLAWYQQKPGKAPKLLIYKASSLESGVPSRFSGSGSGTEFTLTISSLQPDDFATYYCQQYNSYWTFGQGTKVEIK

SEQ ID NO: 1572 - protein, 8 aa, Artificial Sequence
  Synthetic
QQYNSYWT

SEQ ID NO: 1573 - protein, 127 aa, Artificial Sequence
  Synthetic
QVQLVESGGGVVQPGRSLRLSCAASGFTFSSYGMHWVRQAPGKGLEWVAVISYDGSNKYYADSVKGRFTISRDNSKNTLYLQMNSLRAEDTAVYYCAKASGIYCSGGNCYSYYFDYWGQGTLVTVSS

SEQ ID NO: 1574 - protein, 20 aa, Artificial Sequence
  Synthetic
AKASGIYCSGGNCYSYYFDY

SEQ ID NO: 1575 - protein, 106 aa, Artificial Sequence
  Synthetic
DIQMTQSPSTLSASVGDRVTITCRASQSISSWLAWYQQKPGKAPKLLIYKASSLESGVPSRFSGSGSGTEFTLTISSLQPDDFATYYCQQYNSYSTFGQGTKVEIK

SEQ ID NO: 1576 - protein, 8 aa, Artificial Sequence
  Synthetic
QQYNSYST

SEQ ID NO: 1577 - protein, 128 aa, Artificial Sequence
  Synthetic
QVQLQESGPGLVKPSETLSLTCAVSGGSVSSGNYYWNWIRQPPGKGLEWIGYIYYSGSTNYNPSLKSRVTISVDTSKNQFSLKLNSVTAADTAVYHCARETYYYDSSGYYISDAFDIWGQGTMVTVSS

SEQ ID NO: 1578 - protein, 20 aa, Artificial Sequence
  Synthetic
ARETYYYDSSGYYISDAFDI

SEQ ID NO: 1579 - protein, 107 aa, Artificial Sequence
  Synthetic
DIQMTQSPSTLSASVGDRVTITCRASQSISSWLAWYQQKPGKAPKLLIYKASSLESGVPSRFSGSGSGTEFTLTISSLQPDDFATYYCQQYNSFSYTFGQGTKLEIK

SEQ ID NO: 1580 - protein, 9 aa, Artificial Sequence
  Synthetic
QQYNSFSYT

SEQ ID NO: 1581 - protein, 127 aa, Artificial Sequence
  Synthetic
QVQLVESGGGVVQPGRSLRLSCAASGFTFSSYGMHWVRQAPGKGLEWVAVISYDGSNKYYADSVKGRFTISRDNSKNTLYLQMNSLRAEDTAVYYCAKASGIYCSGGDCYSYYFDYWGQGTLVTVSS

SEQ ID NO: 1582 - protein, 20 aa, Artificial Sequence
  Synthetic
AKASGIYCSGGDCYSYYFDY

SEQ ID NO: 1583 - protein, 106 aa, Artificial Sequence; identical to SEQ ID NO: 1575
  Synthetic

SEQ ID NO: 1584 - protein, 8 aa, Artificial Sequence
  Synthetic
QQYNSYST

SEQ ID NO: 1585 - protein, 129 aa, Artificial Sequence
  Synthetic
  misc_feature (121)..(121): Xaa can be any naturally occurring amino acid
QLQLQESGPGLVKPSETLSLTCTVSGGSISSSNYYWGWIRQPPGKGLEWIGSIYYSGSTYYNPSLKSRVTISVDTSKNQFSLKVSSVTAADTAVYYCARHAAAYYDRSGYYFIEYFQHWGXGTLVTVSS

SEQ ID NO: 1586 - protein, 21 aa, Artificial Sequence
  Synthetic
ARHAAAYYDRSGYYFIEYFQH

SEQ ID NO: 1587 - protein, 107 aa, Artificial Sequence
  Synthetic
DIQMTQSPSTLSASVGDRVTITCRASQSISSWLAWYQQKPGKAPKLLIYKASSLESGVPSRFSGSGSGTEFTLTISSLQPDDFATYYCQKYNSYRYTFGQGTKLEIK

SEQ ID NO: 1588 - protein, 9 aa, Artificial Sequence
  Synthetic
QKYNSYRYT

SEQ ID NO: 1589 - protein, 124 aa, Artificial Sequence; identical to SEQ ID NO: 1257
  Synthetic

SEQ ID NO: 1590 - protein, 17 aa, Artificial Sequence
  Synthetic
VKEGRPSDTVVVVAFDY

SEQ ID NO: 1591 - protein, 107 aa, Artificial Sequence
  Synthetic
DIQMTQSPSTLSASVGDRVTITCRASQSISSWLAWYQQKPGKAPKLLIYKASSLESGVPSRFSGSGSGTEFTLTISSLQPDDFATYYCQQYNSYSYSFGQGTKLDIK

SEQ ID NO: 1592 - protein, 9 aa, Artificial Sequence
  Synthetic
QQYNSYSYS

SEQ ID NO: 1593 - protein, 120 aa, Artificial Sequence
  Synthetic
EVQLVQSGAEVKKPGESLKISCKGSGFLFSRYWIGWVRQMPGKGLEWLGIIYSGDSDTRYSPSFQGQVTFSVDKSVNTAYLHWSSLKASDTAVYYCARTQHGVTDAFDIWGQGTMVTVSP

SEQ ID NO: 1594 - protein, 13 aa, Artificial Sequence
  Synthetic
ARTQHGVTDAFDI

SEQ ID NO: 1595 - protein, 106 aa, Artificial Sequence
  Synthetic
DIQMTQSPSTLSASVGDRVTITCRASQSISSWLAWYQQKPGKAPKFLIYEASRLESGVPSRFSGSGSGTEFTLTINSLQPDDFATYYCQQYSNYSPTFGQGTKVEF

SEQ ID NO: 1596 - protein, 9 aa, Artificial Sequence
  Synthetic
QQYSNYSPT

SEQ ID NO: 1597 - protein, 131 aa, Artificial Sequence
  Synthetic
QVQLVQSGAEVKKPGASVKVSCQVFGYTYTHYYMHWVRQAPGQGLEWMGVINPGGGSTTYSQKFQGRVTLTRDTSTSTVYMELSSLGSEDTAVYYCARDRLTYCSGGNCQDYHYFYYMDVWGKGTTVTVSS

SEQ ID NO: 1598 - protein, 24 aa, Artificial Sequence
  Synthetic
ARDRLTYCSGGNCQDYHYFYYMDV

SEQ ID NO: 1599 - protein, 107 aa, Artificial Sequence
  Synthetic
DIQMTQSPSTLSASVGDRVTITCRASQSISSWLAWYQQKPGKAPKLLIYKASSLESGVPPRFSGSGSGTEFTLTISSLQPDDFATYYCQRYNSYSLTFGGGTKVEIK

SEQ ID NO: 1600 - protein, 9 aa, Artificial Sequence
  Synthetic
QRYNSYSLT

SEQ ID NO: 1601 - protein, 118 aa, Artificial Sequence
  Synthetic
EVQLVQSGVQVKEPGQSLKISCKGSGYSFATYWIGWVRQMPGKGLEWMGIIHPGDSETTYGPSFQGQVTISADKSISTAYLQWDSLKVSDSAMYYCAMTYSSGEFDYWGQGTLVTVSS

SEQ ID NO: 1602 - protein, 11 aa, Artificial Sequence
  Synthetic
AMTYSSGEFDY

SEQ ID NO: 1603 - protein, 107 aa, Artificial Sequence
  Synthetic
DIQMTQSPSTLSASVGDRVTITCRASQSISPWLAWYQQKPGKAPKLLIYRASNLQSGVPSRFSGSGSGTEFTLTISSLQPDDFATYYCQQYNHYSGTFGPGTKVEIK

SEQ ID NO: 1604 - protein, 9 aa, Artificial Sequence
  Synthetic
QQYNHYSGT

SEQ ID NO: 1605 - protein, 122 aa, Artificial Sequence
  Synthetic
QVQLVQSGAAVKKPGASVKVSCKASGYTFTTYYMHWVRQAPGQGLEWMGIINPSAGSTTYAQRFQGRVTMTTDTSTSTVYMELSSLRSEDTAVYYCARGALIPMVGAPFDYWGQGTLVTVSS

SEQ ID NO: 1606 - protein, 15 aa, Artificial Sequence
  Synthetic
ARGALIPMVGAPFDY

SEQ ID NO: 1607 - protein, 108 aa, Artificial Sequence
  Synthetic
DIQMTQSPSTLSASVGDRVTITCRASQSIGTGLAWYQQKPGTAPKVLIYKASTLESGVPSRFSGSGSGTEFTLTISSLQPDDFATYYCQYYSSYSPGYTFGQGTTLEI

SEQ ID NO: 1608 - protein, 11 aa, Artificial Sequence
  Synthetic
QYYSSYSPGYT

SEQ ID NO: 1609 - protein, 129 aa, Artificial Sequence
  Synthetic
QLQLQESGPGLVKPSETLSVTCTVSGGSISSSRYYWGWIRQPPGKGLEWIGSIYYSGSTYYNPSLKSRVTISVDTSKNQFSLKLSSVTAADTAVYYCARHAAAYYDRSGYYFIEYFQHWGQGTLVTVSS

SEQ ID NO: 1610 - protein, 21 aa, Artificial Sequence
  Synthetic
ARHAAAYYDRSGYYFIEYFQH

SEQ ID NO: 1611 - protein, 107 aa, Artificial Sequence
  Synthetic
DIQMTQSPSTLSASVGDSVTITCRASQSISSWLAWYQQKPGKAPKLLIYKASSLESGVPSRFSGSGSGTEFTLTISSLQPDDFATYYCQQYNNYRYTFGQGTKLEIK

SEQ ID NO: 1612 - protein, 9 aa, Artificial Sequence
  Synthetic
QQYNNYRYT

SEQ ID NO: 1613 - protein, 128 aa, Artificial Sequence
  Synthetic
QVQLQESGPGLVKPSETLSLTCTVSGGSVSSGTFYWSWIRQPPGKGLEWIGYIHYSGSTNYNPSLKSRVTISVDTSKNQFSLRLSSVTAADTAVYYCARESFYYDRSGYYGSDAFDIWGQGTMVTVSS

SEQ ID NO: 1614 - protein, 20 aa, Artificial Sequence
  Synthetic
ARESFYYDRSGYYGSDAFDI

SEQ ID NO: 1615 - protein, 107 aa, Artificial Sequence
  Synthetic
DIQMTQSPSTLSSSVGDRVTITCRASQNISRWLAWYQQKPGKAPKLLIYKASTLESGVPSRFSGSGSGTKFTLTISSLQPDDFATYYCQQYNSYLYTFGQGTKLEMK

SEQ ID NO: 1616 - protein, 9 aa, Artificial Sequence
  Synthetic
QQYNSYLYT

SEQ ID NO: 1617 - protein, 116 aa, Artificial Sequence
  Synthetic
EVQLVESGGGLIHPGGSLRLSCAASDIIVSSNYMSWVRQAPGKGLEWVSVIYPGGSAFYGDSVKGRFTVSRDNSKNTLYLQMNSLSAEDTAVYYCARDLVVNGMDVWGQGTTVIVS

SEQ ID NO: 1618 - protein, 11 aa, Artificial Sequence
  Synthetic
ARDLVVNGMDV

SEQ ID NO: 1619 - protein, 106 aa, Artificial Sequence
  Synthetic
DIQLTQSPSFLSASVGDRVTITCRASQGISNYLAWYQQKPGKAPKLLIYAASTLQSGVPSRFSGSGSGTEFTLTISGLQPEDFATYYCQLLNSDPYTFGQGTKLEI

SEQ ID NO: 1620 - protein, 9 aa, Artificial Sequence
  Synthetic
QLLNSDPYT

SEQ ID NO: 1621 - protein, 117 aa, Artificial Sequence
  Synthetic
EVQLVESGGGLIQPGGSLRLSCAASGFTVSSNYMTWVRQAPGKGLEWVSLIYSGGSTFYADSVKGRFTISRDSSKNTLYLQMNSLRAEDTAVYYCARGYGDYYFDYWGQGTLVTVSS

SEQ ID NO: 1622 - protein, 11 aa, Artificial Sequence
  Synthetic
ARGYGDYYFDY

SEQ ID NO: 1623 - protein, 103 aa, Artificial Sequence
  Synthetic
DIQLTQSPSFLSASVGDRVTITCRASQGISSYLAWYQQKPGKAPKLLIYAASTLQSGVPSRFSGSGSGTEFTLTISSLQPEDSATYYCQHLNGFGPGTKVDIK

SEQ ID NO: 1624 - protein, 5 aa, Artificial Sequence
  Synthetic
QHLNG

SEQ ID NO: 1625 - protein, 117 aa, Artificial Sequence
  Synthetic
EVQLVESGGGLIQPGGSLRLSCAASGFTVSSNYMSWVRQAPGKGLEWVSVIYSGGSTFYADSVKGRFTISRDNSKNTLYLQMNSLRAEDTAVYYCARDLSVFGMDVWGQGTTVTVSS

SEQ ID NO: 1626 - protein, 11 aa, Artificial Sequence
  Synthetic
ARDLSVFGMDV

SEQ ID NO: 1627 - protein, 105 aa, Artificial Sequence
  Synthetic
  misc_feature (86)..(86): Xaa can be any naturally occurring amino acid
DIQLTQSPSFLSASVGDRVTVTCRASQGISSYLAWYQQKPGKAPKLLIYAASTLQSGVPSRFSGSGSGTEFTLTISSLQPEDFATXYCQQVNSYSHFGGGSKAEI

SEQ ID NO: 1628 - protein, 8 aa, Artificial Sequence
  Synthetic
QQVNSYSH

SEQ ID NO: 1629 - protein, 123 aa, Artificial Sequence
  Synthetic
EVQLLESGGDLVQPGGSLRLSCEASGFTFSIYAMSWVRQVPGTGLEWVSGFSGNTGDTHYADSVKGRFTISRDTSSNTLYLQMNSLRAGDTAIYYCAKHAMGGWYGFGAFDIWGQGTTVTVSS

SEQ ID NO: 1630 - protein, 16 aa, Artificial Sequence
  Synthetic
AKHAMGGWYGFGAFDI

SEQ ID NO: 1631 - protein, 107 aa, Artificial Sequence
  Synthetic
DIQLTQSPSFLSASVGDRVTITCRASQGIDSYLAWYQQTPGKAPKLLIYAASTLQSGVPSRFSGSGSGTDFTLTISSLQPEDFATYYCQRLNGYPWTFGQGTKVEIK

SEQ ID NO: 1632 - protein, 9 aa, Artificial Sequence
  Synthetic
QRLNGYPWT

SEQ ID NO: 1633 - protein, 122 aa, Artificial Sequence
  Synthetic
EVQLVESGGGLVKPGGSLRLSCAASGFTFSSAWMSWVRQAPGKGLEWVGRIKTKTDGGTKDYAAPVKGRFTISRDDSKNTLYLQMNSLKTEDTAVYYCTTTNDYGDYSPAYWGQGTLVTVSS

SEQ ID NO: 1634 - protein, 13 aa, Artificial Sequence
  Synthetic
TTTNDYGDYSPAY

SEQ ID NO: 1635 - protein, 112 aa, Artificial Sequence
  Synthetic
DIVMTQSPDSLAVSLGERATINCKSSQSILYVSNNKNYLAWYQQKPGQPPKLLIYWASTRESGVPDRFSGSGSGTDFTLTIGSLQAEDVAVYYCQQYYSPPPTFGQGTKVEI

SEQ ID NO: 1636 - protein, 9 aa, Artificial Sequence
  Synthetic
QQYYSPPPT

SEQ ID NO: 1637 - protein, 126 aa, Artificial Sequence
  Synthetic
QVQLVQSGAEVKKPGASVKVSCKASGYSFTEYYIHWVRQAPGQGLEWMGMINPRINPSGSSTTYAQKFQDRVTMTRDTSTSTVYMELSSLRSDDTAVFFCARDGKSTVGATTPDYWGQGTLVTVSS

SEQ ID NO: 1638 - protein, 15 aa, Artificial Sequence
  Synthetic
ARDGKSTVGATTPDY

SEQ ID NO: 1639 - protein, 113 aa, Artificial Sequence
  Synthetic
DIVMTQSPDSLAVSLGERATINCKSSQSLLYSSNNKNYLVWYQQKPGQPPKLLIYWASIRESGVPDRFSGSGSGTDFTLTISSLQAEDVAVYYCQQYYSSPITFGQGTRLEIK

SEQ ID NO: 1640 - protein, 9 aa, Artificial Sequence
  Synthetic
QQYYSSPIT

SEQ ID NO: 1641 - protein, 123 aa, Artificial Sequence
  Synthetic
QVQLVQSGAEVKKPGSSVKVSCKASGGTFSSYAISWVRQAPGQGLEWMGGIIPIFGTTNYAQKFQGRVTITADESTSTTYMELSSLRSEDTAVYYCAREVDYCSSAYCYADYWGQGTLVTVSS

SEQ ID NO: 1642 - protein, 16 aa, Artificial Sequence
  Synthetic
AREVDYCSSAYCYADY

SEQ ID NO: 1643 - protein, 113 aa, Artificial Sequence
  Synthetic
DIVMTQSPDSLAVSLGERATINCKSSQSVLYSSNNKNYLAWYQQKPGQPPKLLIYWASTRESGVPDRFSGSGSGTDFTLTISSLQAEDVAVYYCQQYYSTPFTFGPGTKVDIK

SEQ ID NO: 1644 - protein, 9 aa, Artificial Sequence
  Synthetic
QQYYSTPFT

SEQ ID NO: 1645 - protein, 126 aa, Artificial Sequence
  Synthetic
QVQLQESGPGLVKPSQTLSLTCTVSGVSVSSGFYYWSWIRQPPGKGLEWIGYSFYSGNTNYNPSLKSRVTISVDTSKNRFSLRLTSVTAADTGLYFCARGVVEYYDHTSAYYLDSWGQGTLVTVSS

SEQ ID NO: 1646 - protein, 18 aa, Artificial Sequence
  Synthetic
ARGVVEYYDHTSAYYLDS

SEQ ID NO: 1647 - protein, 113 aa, Artificial Sequence
  Synthetic
DIVMTQSPDSLAVSLGERATINCKSSQSVLYSSNNKNYIAWYQQKPGQPPKLLIYWASTREFGVPDRFSGSGSGTDFTLTISSLQAEDVAVYYCQQYYTTPYTFGQGTKLEIK

SEQ ID NO: 1648 - protein, 9 aa, Artificial Sequence
  Synthetic
QQYYTTPYT

SEQ ID NO: 1649 - protein, 123 aa, Artificial Sequence
  Synthetic
QVQLVESGGGVVQPGRSLRLSCAASGFTFSSYAMHWVRQAPGKGLEWVAVISYDGSTKYYAESVKGRFTISRDSSKNTLYLQMNSLRAEDTAVYYCARDSEDCSSMICYVDYWGQGTLVTVSS

SEQ ID NO: 1650 - protein, 16 aa, Artificial Sequence
  Synthetic
ARDSEDCSSMICYVDY

SEQ ID NO: 1651 - protein, 113 aa, Artificial Sequence
  Synthetic
DIVMTQSPDSLAVSLGERATINCKSSQSVFYSSNNKNYFAWYQQKPGQPPKLLIYWASTRESGVPDRFSGSGSGTDFTLTISSLQAEDVAVYYCQQYYSSPLTFGPGTKVDIK

SEQ ID NO: 1652 - protein, 9 aa, Artificial Sequence
  Synthetic
QQYYSSPLT

SEQ ID NO: 1653 - protein, 127 aa, Artificial Sequence
  Synthetic
EVQLLESGGGLVQPGGSLRLSCAASGFTFSSYAMSWVRQAPGRGLEWVSTLSGSAAGTYYADSVKGRFTISRDNSKNTLYLQMNSLSAEDTAVYYCAKASRDPRIQFWSHAQYFQHWGRGTLVTVSS

SEQ ID NO: 1654 - protein, 20 aa, Artificial Sequence
  Synthetic
AKASRDPRIQFWSHAQYFQH

SEQ ID NO: 1655 - protein, 113 aa, Artificial Sequence
  Synthetic
DIVMTQSPDSLAVSLGERATISCKSSQSVFYSSNNKNYLAWYQQKPGQPPKLLIYWASTRESGVPDRFSGSGSGTDFTLTISSLQAEDVAVYYCQQYDTTPWTFGQGTKVEIK

SEQ ID NO: 1656 - protein, 9 aa, Artificial Sequence
  Synthetic
QQYDTTPWT

SEQ ID NO: 1657 - protein, 123 aa, Artificial Sequence
  Synthetic
QVQLVESGGGVVQPGRSLRLSCAASGFTFSSYAMHWVRQAPGKGLEWVAVISYDGSNKYYADSVKGRFTISRDNSKNTLYLQMNSLRAEDTAVYYCARDSEDCSSTSCYLDYWGQGTLVTVSS

SEQ ID NO: 1658 - protein, 16 aa, Artificial Sequence
  Synthetic
ARDSEDCSSTSCYLDY

SEQ ID NO: 1659 - protein, 113 aa, Artificial Sequence
  Synthetic
  misc_feature (9)..(9): Xaa can be any naturally occurring amino acid
DIVMTQSPXSLAVSLGERATINCKSSQSVLYSSNNKNYLAWYQQKPGQPPKLLIYWASTRESGVPDRFSGSGSGTDFTLTISSLQAEDVAVYYCQQYYSTPFTFGPGTKVDIK

SEQ ID NO: 1660 - protein, 9 aa, Artificial Sequence
  Synthetic
QQYYSTPFT

SEQ ID NO: 1661 - protein, 132 aa, Artificial Sequence
  Synthetic
EVQLLESGGGLVQPGGSLRLSCAASGFTFSNYAMNWVRQAPGRGLEWVSAISSGGDRTYYADSVKGRFSISRDRSRNNLYLQTNSLRAEDTAIYYCVKGPYFDFWSGSYDDLPYYYHGMDVWGQGTTVIVSS

SEQ ID NO: 1662 - protein, 25 aa, Artificial Sequence
  Synthetic
VKGPYFDFWSGSYDDLPYYYHGMDV

SEQ ID NO: 1663 - protein, 112 aa, Artificial Sequence
  Synthetic
DIVMTQTPLSSPVTLGQTASISCRSSQSLVHSDGTTYLSWLQQRPGQPPRLLIYKISNRFSGVPDRFSGSGAGTDFTLKISRVEAEDVGVYYCMQGTEFPHTFGQGTKLEIK

SEQ ID NO: 1664 - protein, 9 aa, Artificial Sequence
  Synthetic
MQGTEFPHT

SEQ ID NO: 1665 - protein, 122 aa, Artificial Sequence
  Synthetic
QVQLVQSGAEVKKPGSSVKVSCKASGGTFSSYAISWVRQAPGQGLEWMGGIVPMFGTANYPQKFQDRVTITADRSTSTTYMELSSLTSEDTAVYYCARGRHTAIARPFYDYWGQGTLVTVSS

SEQ ID NO: 1666 - protein, 15 aa, Artificial Sequence
  Synthetic
ARGRHTAIARPFYDY

SEQ ID NO: 1667 - protein, 111 aa, Artificial Sequence
  Synthetic
DIVMTQTPLSLSVTPGQPASISCKSSQSLLDSDGKTYLYWYLQKPGQPPQLLISEVSNRFSGVPDRFSGSGSGTEFTLKISRVEAEDVGVYYCMQNIQLLTFGGGTKVEIK

SEQ ID NO: 1668 - protein, 8 aa, Artificial Sequence
  Synthetic
MQNIQLLT

SEQ ID NO: 1669 - protein, 126 aa, Artificial Sequence
  Synthetic
EVQLVESGGDLVKPGGSLRLSCAASGFTFNNAWMSWVRQAPGKGLEWVGRIKDKSDGETTDYAAPVQGRFTVSRDDSKNTLYLQMNSLKTEDTAVYYCTTGPHYDSSGYSYTVDSWGQGTLVTVSS

SEQ ID NO: 1670 - protein, 17 aa, Artificial Sequence
  Synthetic
TTGPHYDSSGYSYTVDS

SEQ ID NO: 1671 - protein, 112 aa, Artificial Sequence
  Synthetic
DIVMTQSPLSLPVTPGEPASISCRSSQSLLHSTGFHFLEWYLQKPGQSPQLLIYSGSNRASGVPDRFSGSGSGTHFTLKISRVEAEDVGIYYCMQGLQTPLTFGGGTKVEIK

SEQ ID NO: 1672 - protein, 9 aa, Artificial Sequence
  Synthetic
MQGLQTPLT

SEQ ID NO: 1673 - protein, 123 aa, Artificial Sequence
  Synthetic
QVQLQESGPGLVKPSQTLSLTCTVSGGSISSGGYYWSWIRQHPGKGLEWIGYIYYSGSTYYNPSLKSRVTISVDTSKNQFSLKLSSVTAADTAVYYCARTMYYYDSSGSFDYWGQGTLVTVSS

SEQ ID NO: 1674 - protein, 15 aa, Artificial Sequence
  Synthetic
ARTMYYYDSSGSFDY

SEQ ID NO: 1675 - protein, 112 aa, Artificial Sequence
  Synthetic
DIVMTQSPLSLPVTPGEPASISCRSSQSLLHSNGYNYLDWYLQKPGQSPQLLIYLGSNRASGVPDRFSGSGSGTDFTLKISRVEAEDVGVYYCMQALQTPHTFGGGTKVEIK

SEQ ID NO: 1676 - protein, 9 aa, Artificial Sequence
  Synthetic
MQALQTPHT

SEQ ID NO: 1677 - protein, 131 aa, Artificial Sequence
  Synthetic
QVQLVESGGGVVQPGRSLRLSCAASGFTFSSYGMHWVRQAPGKGLEWVAVIWYDGSNKYYADSVKGRFTISRDNSKNTLYLQMNSLRAEDTAVYYCARDGAVVRFLEWPTVGYYYYYMDVWGKGTTVTVSS

SEQ ID NO: 1678 - protein, 24 aa, Artificial Sequence
  Synthetic
ARDGAVVRFLEWPTVGYYYYYMDV

SEQ ID NO: 1679 - protein, 112 aa, Artificial Sequence
  Synthetic
DIVMTQSPLSLPVTPGEPASISCRSSQSLLHSNGYNYLDWYLQKPGQSPQLLIYLGSNRASGVPDRFSGSGSGTDFTLKISRVEAEDVGVYYCMQALQTPITFGQGTRLEIK

SEQ ID NO: 1680 - protein, 9 aa, Artificial Sequence
  Synthetic
MQALQTPIT

SEQ ID NO: 1681 - protein, 123 aa, Artificial Sequence
  Synthetic
QVQLQESGPGLVKPSQTLSLTCTVSGGSISSGGYYWSWIRQHPGKGLEWIGYIYYSGSTYYNPSLKSRVTISVDTSKNQFSLKLSSVTAADTAVYYCARVWQYYDSSGSFDYWGQGTLVTVSS

SEQ ID NO: 1682 - protein, 15 aa, Artificial Sequence
  Synthetic
ARVWQYYDSSGSFDY

SEQ ID NO: 1683 - protein, 112 aa, Artificial Sequence
  Synthetic
DIVMTQSPLSLPVTPGEPASISCRSSQSLLHSNGYNYLDWYLQKPGQSPQLLIYLGSNRASGVPDRFSGSGSGTDFTLKISRVEAEDVGVYYCMQALQTPFTFGPGTKVDIK

SEQ ID NO: 1684 - protein, 9 aa, Artificial Sequence
  Synthetic
MQALQTPFT

SEQ ID NO: 1685 - protein, 123 aa, Artificial Sequence; identical to SEQ ID NO: 1681
  Synthetic

SEQ ID NO: 1686 - protein, 15 aa, Artificial Sequence
  Synthetic
ARVWQYYDSSGSFDY

SEQ ID NO: 1687 - protein, 112 aa, Artificial Sequence; identical to SEQ ID NO: 1683
  Synthetic

SEQ ID NO: 1688 - protein, 9 aa, Artificial Sequence
  Synthetic
MQALQTPFT

SEQ ID NO: 1689 - protein, 126 aa, Artificial Sequence
  Synthetic
EVQLVESGGGLVKPGGSLRLSCAASGFTFSNAWMNWVRQAPGKGLEWVGRIKDKSDGGTIDYAAPVQGRFTISRDDSKNTLYLQMNSLKTEDTAVYYCTTGPHYDDSGYSYTVDYWGQGTLVTVSS

SEQ ID NO: 1690 - protein, 17 aa, Artificial Sequence
  Synthetic
TTGPHYDDSGYSYTVDY

SEQ ID NO: 1691 - protein, 112 aa, Artificial Sequence
  Synthetic
DIVMTQSPLSLPVTPGEPASISCRSSQSLLHSNGFHFLDWYLQKPGQTPQLLIYVGSNRASGVPDRFSGSGSGTDFTLKISRVEAEDVGVYYCMQALQTPLTFGGGTKVEIK

SEQ ID NO: 1692 - protein, 9 aa, Artificial Sequence
  Synthetic
MQALQTPLT

SEQ ID NO: 1693 - protein, 123 aa, Artificial Sequence
  Synthetic
QVQLQESGPGLVKPSQTLSLTCTVSGGSISSGPYYWSWIRQHPGKGLEWIGYIYYSGSTYYNPSLKSRVTISVDTSKKQFSLNLNSVTAADTAVYYCARVWQYYDSTGSFDYWGQGTLVTVSS

SEQ ID NO: 1694 - protein, 15 aa, Artificial Sequence
  Synthetic
ARVWQYYDSTGSFDY

SEQ ID NO: 1695 - protein, 112 aa, Artificial Sequence
  Synthetic
DIVMTQSPLSLPVTPGEPASISCRSSRGLLHSNGYNYLDWYLQKPGQSPQLLIYLGSNRASGVPDRFSGSGSVTDFTLNISRVEAEDVGVYYCMQALQTPFTFGPGTKVDIK

SEQ ID NO: 1696 - protein, 9 aa, Artificial Sequence
  Synthetic
MQALQTPFT

SEQ ID NO: 1697 - protein, 126 aa, Artificial Sequence
  Synthetic
EVQLVESGGGLVKPGGSLRLSCAASGFTFTNAWMNWVRQAPGKGLEWVGRIKAMTDGGTTDYAAPVQGRFTISRDDSRNTLYLQMNSLKTEDTAVYSCTTGPQYDDNGYSYTVDYWGQGTLVTVSS

SEQ ID NO: 1698 - protein, 17 aa, Artificial Sequence
  Synthetic
TTGPQYDDNGYSYTVDY

SEQ ID NO: 1699 - protein, 112 aa, Artificial Sequence
  Synthetic
  misc_feature (25)..(25): Xaa can be any naturally occurring amino acid
DIVMTQSPLSLPVTPGEPASISCRXSQSLLHSNGFHFVDWYLQKPGQSPHLLIYLGSNRASGVPDRFSGSGSGTDFTLKISRVEAEDVGVYYCMQALQTPLTFGGGTKVEIK

SEQ ID NO: 1700 - protein, 9 aa, Artificial Sequence
  Synthetic
MQALQTPLT

SEQ ID NO: 1701 - protein, 126 aa, Artificial Sequence
  Synthetic
EVQLVESGGGLVKPGGSLRLSCVASGFTFRNAWMNWVRQAPGKGLEWVGRIKANSDGGTIDYAEPVQGRFTISREDSRNSLYLQMNSLKTEDTAVYYCTTGPQYDDFGHSYIVDSWGPGTLVTVSS

SEQ ID NO: 1702 - protein, 17 aa, Artificial Sequence
  Synthetic
TTGPQYDDFGHSYIVDS

SEQ ID NO: 1703 - protein, 112 aa, Artificial Sequence
  Synthetic
DIVMTQSPLSLPVTLGEPASISCRSSQSLLHSNGFHFLEWYLQKPGQSPQLLIYVGSNRASGVPDRFSGSGSGTDFTLKISRVEAEDVGVYYCMQTLQTPLTFGGGTKVEIK

SEQ ID NO: 1704 - protein, 9 aa, Artificial Sequence
  Synthetic
MQTLQTPLT

SEQ ID NO: 1705 - protein, 126 aa, Artificial Sequence; identical to SEQ ID NO: 1669
  Synthetic

SEQ ID NO: 1706 - protein, 17 aa, Artificial Sequence
  Synthetic
TTGPHYDSSGYSYTVDS

SEQ ID NO: 1707 - protein, 112 aa, Artificial Sequence
  Synthetic
  misc_feature (14)..(14): Xaa can be any naturally occurring amino acid
DIVMTQSPLSLPVXPGEPASISCRSSQSLLHSNGFHFLEWYLQKPGQSPQLLIYSGSNRASGVPDRFSGSGSGTHFTLKISRVEAEDVGVYYCMQGLQTPLTFGGGTKVEIK

SEQ ID NO: 1708 - protein, 9 aa, Artificial Sequence
  Synthetic
MQGLQTPLT

SEQ ID NO: 1709 - protein, 121 aa, Artificial Sequence
  Synthetic
QVQLVESGGGVVQPGRSLRLSCAATGFTFSNFGMHWVRQAPGKGLEWVAVISYHGTNKDYADSVKGRFTISRDNSKNTLYLQLNSLRFDDTAVYYCARALDGDYSEYFQHWGQGTLVTVSS

SEQ ID NO: 1710 - protein, 14 aa, Artificial Sequence
  Synthetic
ARALDGDYSEYFQH

SEQ ID NO: 1711 - protein, 112 aa, Artificial Sequence
  Synthetic
DVVMTQSPLSLPVTLGQPASISCTSSQSLLFSDGNTYLTWFQQRPGQSPRRLIYKVSNRDSGVPDRFSGSGSGTDFTLKISRVEAEDVGVYYCMQSTHWPQTFGQGTKVEIK

SEQ ID NO: 1712 - protein, 9 aa, Artificial Sequence
  Synthetic
MQSTHWPQT

SEQ ID NO: 1713 - protein, 126 aa, Artificial Sequence
  Synthetic
QVQLVESGGGVVQPGRSLRLSCAASGFTFSNYGMHWVRQAPGKGLEWVAVISYDGSNKYFADSVKGRFTISRDNSKNTLYLQMNSLRAEDTAVYYCARATCSGGSCLFGQNAFDIWGQGTMVTVSS

SEQ ID NO: 1714 - protein, 19 aa, Artificial Sequence
  Synthetic
ARATCSGGSCLFGQNAFDI

SEQ ID NO: 1715 - protein, 113 aa, Artificial Sequence
  Synthetic
DVVMTQSPLSLPVTLGQPASISCRSSQSLVYSDGNTYLNWFQQRPGQSPRRLIYKVSNRDSGVPDRFSGSGSGTDFTLKISRVEAEDVGVYYCMQGTHWPPYTFGQGTKLEIK

SEQ ID NO: 1716 - protein, 10 aa, Artificial Sequence
  Synthetic
MQGTHWPPYT

SEQ ID NO: 1717 - protein, 128 aa, Artificial Sequence
  Synthetic
QVQLVESGGGLVKPGGSLRLSCAASGFTFSDYYMSWIRQAPGKGLEWVSYISSSGNSIYSADSVKGRFTISRDNAKNSLYLQMNSLRAEDTAVYYCATPPGGNPTYYYDTSGYSLAYWGQGTLVTVSS

SEQ ID NO: 1718 - protein, 21 aa, Artificial Sequence
  Synthetic
ATPPGGNPTYYYDTSGYSLAY

SEQ ID NO: 1719 - protein, 112 aa, Artificial Sequence
  Synthetic
DVVMTQSPLSLPVTLGQPASISCRSSQSLVYSDGNTYLNWFQQRPGQSPRRLIYNVSNRDSGVPDRFSGSGSGTDFTLKISRVEAEDVGVYYCMQGTHWPPNFGQGTRLEIK

SEQ ID NO: 1720 - protein, 9 aa, Artificial Sequence
  Synthetic
MQGTHWPPN

SEQ ID NO: 1721 - protein, 123 aa, Artificial Sequence
  Synthetic
QVQLVESGGGVVQPGRSLRLSCAASGFTFSSYGMHWVRQAPGKGLEWVAVIWYDGSNKYYADSVKGRFTISRDNSKNTLYLQMNSLRAEDTAVYYCAREHTPTDIVVVNVEYWGQGTLVTVSS

SEQ ID NO: 1722 - protein, 16 aa, Artificial Sequence
  Synthetic
AREHTPTDIVVVNVEY

SEQ ID NO: 1723 - protein, 112 aa, Artificial Sequence
  Synthetic
DVVMTQSPLSLPVTLGQPASISCRSSQSLVYIDGNTYLNWFQQRPGQSPRRLIYKVSNRDSGVPDRFSGSGSGTDFTLKISRVEAEDVGVYYCMQGTHWPYTFGQGTKLEIK

SEQ ID NO: 1724 - protein, 9 aa, Artificial Sequence
  Synthetic
MQGTHWPYT

SEQ ID NO: 1725 - protein, 122 aa, Artificial Sequence
  Synthetic
QVQLVESGGGVVQPGRSLRLSCAASGFTFSSYGMHWVRQAPGKGLEWVAVIWHDGSNKYYADSVKGRFTISRDNSKNTLYLQMNSLRAEDTALYYCARDPSVVVTAIDFDYWGQGTLVTVSS

SEQ ID NO: 1726 - protein, 15 aa, Artificial Sequence
  Synthetic
ARDPSVVVTAIDFDY

SEQ ID NO: 1727 - protein, 112 aa, Artificial Sequence
  Synthetic
DVVMTQSPLSLPVTLGQPASISCRSSQSLVFSDGNTYLNWFQQRPGQSPRRLIYKVSNRDSGVPDRFSGSGSGTDFTLKISRVEAEDVGVYFCMQGTHWPWTFGQGTKVEIK

SEQ ID NO: 1728 - protein, 9 aa, Artificial Sequence
  Synthetic
MQGTHWPWT

SEQ ID NO: 1729 - protein, 123 aa, Artificial Sequence
  Synthetic
QVQLVESGGGVVQPGRSLRLSCAASGFTFRDYGMHWVRQAPGKGLEWVAVIWYDGSNKYYGDSVKGRFTISRDNSKNTLYLEMTSLRAEDTAVYYCARESSPDMIVVVDIDVWGKGTTVTVSS

SEQ ID NO: 1730 - protein, 16 aa, Artificial Sequence
  Synthetic
ARESSPDMIVVVDIDV

SEQ ID NO: 1731 - protein, 112 aa, Artificial Sequence
  Synthetic
DVVMTQSPLSLPVTLGQPASISCRSSQSLVYIDENTYLNWFQQRPGQSPRRLIYKVSNRDSGVPDRFSGSGSGTDFTLKISRVEAEDVGIYYCMQGTHWPYTFGQGTKLEIK

SEQ ID NO: 1732 - protein, 9 aa, Artificial Sequence
  Synthetic
MQGTHWPYT

SEQ ID NO: 1733 - protein, 123 aa, Artificial Sequence
  Synthetic
QVQLVESGGGLVKPGGSLRLSCAVSGFTFSEYYMSWIRQAPEKGLEWVSHISSSGSTMYYADSVKGRFTISRDNAKNSLYLQMNSLRAEDTAVYYCATDRTKNSYDSSGGDYWGQGTLVTVSS

SEQ ID NO: 1734 - protein, 16 aa, Artificial Sequence
  Synthetic
ATDRTKNSYDSSGGDY

SEQ ID NO: 1735 - protein, 113 aa, Artificial Sequence
  Synthetic
DVVMTQSPLSLPVTLGQPASISCRSSESLVYSDGNTYLSWFQQRPGQSPRRLIYKVSNRDSGVPDRFSGSGSGTDFTLKISRVEAEDVGVYYCMQGTHWPPYTFGQGTKLEIK

SEQ ID NO: 1736 - protein, 10 aa, Artificial Sequence
  Synthetic
MQGTHWPPYT

SEQ ID NO: 1737 - protein, 120 aa, Artificial Sequence; identical to SEQ ID NO: 65
  Synthetic

SEQ ID NO: 1738 - protein, 13 aa, Artificial Sequence
  Synthetic
AKGQLRLGEFDDY

SEQ ID NO: 1739 - protein, 107 aa, Artificial Sequence
  Synthetic
AIQMTQSPSSLSASVGDRVTITCRASQDIRDDLNWYQHKPGKAPKLLIYTASSLQSGVPSRFSGSGSGTDFTLTISRLQPEDFASYYCLQDHNYPLTFGQGTKLEIK

SEQ ID NO: 1740 - protein, 9 aa, Artificial Sequence
  Synthetic
LQDHNYPLT

SEQ ID NO: 1741 - protein, 124 aa, Artificial Sequence
  Synthetic
QVQLVESGGGVVQPGRSLRLSCAASGFTFSSYGMHWVRQAPGKGLEWVAVIWYDGSNKYYADSVKGRFTISRDNSKNTLYLQMNSLRAEDTAVYYCARDHSLGVRGDGYGMDVWGQGTTVTVSS

SEQ ID NO: 1742 - protein, 17 aa, Artificial Sequence
  Synthetic
ARDHSLGVRGDGYGMDV

SEQ ID NO: 1743 - protein, 107 aa, Artificial Sequence
  Synthetic
AIQLTQSPSSLSASVGDRVTITCRASQGISSALAWYQQKPGKAPKFLIYDASSLESGVPSRFSGSGSGTDFTLTISSLQPEDFATYYCQQFNNYPLTFGGGTKVEIK

SEQ ID NO: 1744 - protein, 9 aa, Artificial Sequence
  Synthetic
QQFNNYPLT

SEQ ID NO: 1745 - protein, 120 aa, Artificial Sequence
  Synthetic
EVQLLESGGGLVQPGGSLRLSCVASRFIFSRYALSWVRQAPGKGLEWVSGISGSGHSTHYADSVTGRFTISRDNSKNTVYLQMSSLRAEDTAVYYCAKGPRSNYDYFESWGQGTLVIVSS

SEQ ID NO: 1746 - protein, 13 aa, Artificial Sequence
  Synthetic
AKGPRSNYDYFES

SEQ ID NO: 1747 - protein, 107 aa, Artificial Sequence
  Synthetic
AIQLTQSPSSLSASVGDRVTITCRASQGISSALAWYQQRPGKAPRLLIYDASSLDSGVPSRFSGSGSGTDFTLTISSLQSEDFATYYCQQFINNPLTFGGGTKVEIK

SEQ ID NO: 1748 - protein, 9 aa, Artificial Sequence
  Synthetic
QQFINNPLT

SEQ ID NO: 1749 - protein, 119 aa, Artificial Sequence
  Synthetic
QVQLVESGGGLVKPGGSLRLSCAASGFTFSDYYMSWIRQAPGKGLEWVSSISSSGSTIYYADSVKGRFTISRDNAKTSLYLQMNSLRAEDTAVYYCARGKWLRGSFDYWGQGTLVTVSS

SEQ ID NO: 1750 - protein, 12 aa, Artificial Sequence
  Synthetic
ARGKWLRGSFDY

SEQ ID NO: 1751 - protein, 111 aa, Artificial Sequence
  Synthetic
NFMLTQPHSVSESPGKTVTISCTGSSGSIASNYVQWYQQRPGSAPTTVIYEDNQRPSGVPDRFSGSIDSSSNSASLTISGLKTEDEADYYCQSYDSSNHWVFGGGTKLTVL

SEQ ID NO: 1752 - protein, 10 aa, Artificial Sequence
  Synthetic
QSYDSSNHWV

SEQ ID NO: 1753 - protein, 125 aa, Artificial Sequence
  Synthetic
EVQLVESGGGLVQPGRSLRLSCAASGFTFDDYAMHWVRQAPGKGLEWVSGISWNSGTIGYADSVKGRFTISRDNAKNSLHLHMRSLRAEDTALYYCAKDGRSGDQWPELYYFDYWGQGTLVTVSS

SEQ ID NO: 1754 - protein, 18 aa, Artificial Sequence
  Synthetic
AKDGRSGDQWPELYYFDY

SEQ ID NO: 1755 - protein, 108 aa, Artificial Sequence
  Synthetic
SYVLTQPPSVSVAPGKTARITCGGNDIGSNGVYWYQQKPGQAPVLVIYYDSDRPSGIPERFSGSNSGNTATLTISRVEAGDEADYYCQVWDSSSDHVVFGGGTKLTVL

SEQ ID NO: 1756 - protein, 11 aa, Artificial Sequence
  Synthetic
QVWDSSSDHVV

SEQ ID NO: 1757 - protein, 122 aa, Artificial Sequence
  Synthetic
QVQLVQSGAEVKKPGASVKVSCKASGYTFTGYYMHWVRQAPGQGLEWMGWINPNSGGTNYAQKFQGRVTMTRDTSISTAYMELSRLRSDDTAVYYCARDSPFSGLGASNDYWGQGTLVTVSS

SEQ ID NO: 1758 - protein, 15 aa, Artificial Sequence
  Synthetic
ARDSPFSGLGASNDY

SEQ ID NO: 1759 - protein, 110 aa, Artificial Sequence
  Synthetic
QSVLTQPPSASGSPGQSVTISCTGTSSDVGGYNYVSWYQQHPGKAPKLMIYEVSKRPSGVPDRFSGSKSGNTASLTVSGLQAEDEADYYCSSDAGSNNVVFGGGTKLTVL

SEQ ID NO: 1760 - protein, 10 aa, Artificial Sequence
  Synthetic
SSDAGSNNVV

SEQ ID NO: 1761 - protein, 124 aa, Artificial Sequence
  Synthetic
QVQLQESGPGLVKPSETLSLTCTVSGGSISAYYWSWIRQPAGKGLEWIGRIYTSGSTIYNPSLKSRVTMSVDTSKNQFSLKLSSVTAADTAVYYCARDNGYVWGSYRPDAFDIWGQGTMVTVSS

SEQ ID NO: 1762 - protein, 18 aa, Artificial Sequence
  Synthetic
ARDNGYVWGSYRPDAFDI

SEQ ID NO: 1763 - protein, 110 aa, Artificial Sequence
  Synthetic
NFMLTQPHSVSESPGKTVTISCTGSSGSIASNYVQWYQQRPGSAPTTVIYEDNQRPSGVPDRISGSIDSSSNSASLTISGLKTEDEADYYCQSYDSRNVVFGGGTRLTVL

SEQ ID NO: 1764 - protein, 9 aa, Artificial Sequence
  Synthetic
QSYDSRNVV

SEQ ID NO: 1765 - protein, 126 aa, Artificial Sequence
  Synthetic
  misc_feature (118)..(118): Xaa can be any naturally occurring amino acid
EVQLVESGGGLVQPGGSLRLSCAASGFTFSSYWMSWVRQAPGKGLEWVANIKQDGSEKYYVDSVKGRFTISRDNAKNSLYLQMNSLRAEDTAVYYCARYYDILTGYYVDYYYMDVWGXGTTVTVSS

SEQ ID NO: 1766 - protein, 19 aa, Artificial Sequence
  Synthetic
ARYYDILTGYYVDYYYMDV

SEQ ID NO: 1767 - protein, 108 aa, Artificial Sequence
  Synthetic
SYVLTQPPSVSVSPGQTARITCSGDALPKQYAFWYQQKPGQAPVLVIYKDSERPSGIPERFSGSSSGTTVTLTISGVQAEDEADYYCQSADSSGTYVVFGGGTRLTVL

SEQ ID NO: 1768 - protein, 11 aa, Artificial Sequence
  Synthetic
QSADSSGTYVV

SEQ ID NO: 1769 - protein, 129 aa, Artificial Sequence
  Synthetic
QVQLVQSGAEVKKPGASVKVSCKASGYTFTGYYMHWVRQAPGQGLEWMGWINPNSGGTNYAQKFQGRVTMTRDTSISTAYMELSRLRSDDTAVYYCATTEGQQLPHPPYYYYYYYMDVWGKGTTVTVSS

SEQ ID NO: 1770 - protein, 22 aa, Artificial Sequence
  Synthetic
ATTEGQQLPHPPYYYYYYYMDV

SEQ ID NO: 1771 - protein, 110 aa, Artificial Sequence
  Synthetic
QSVLTQPASVSGSPGQSITISCTGTSSDVGGYNYVSWYQQHPGKAPKLMIYDVSNRPSGVSNRFSGSKSGNTASLTISGLQAEDEADYYCSSYTSSSTYVFGTGTKVTVL

SEQ ID NO: 1772 - protein, 10 aa, Artificial Sequence
  Synthetic
SSYTSSSTYV

SEQ ID NO: 1773 - protein, 122 aa, Artificial Sequence
  Synthetic
  misc_feature (114)..(114): Xaa can be any naturally occurring amino acid
QVQLVQSGAEVKKPGASVKVSCKASGYTFTGYYMHWVRQAPGQGLEWMGWINPNSGGRNYTQKFQGRVTMTRDTSISTAYMELSRLRSDDTAVYYCARDLGYSYVQGYFDYWGXGTLVTVSS

SEQ ID NO: 1774 - protein, 15 aa, Artificial Sequence
  Synthetic
ARDLGYSYVQGYFDY

SEQ ID NO: 1775 - protein, 110 aa, Artificial Sequence
  Synthetic
QSALTQPASESGSPGQSITISCTGTSSDVGSYNLVSWYQQHPGKAPKLMIYEGSKRPSGVSNRFSGSKSGNTASLTISGLQAEDEADYYCCSYAGSNTWVFGGGTKLTVL

SEQ ID NO: 1776 - protein, 10 aa, Artificial Sequence
  Synthetic
CSYAGSNTWV

SEQ ID NO: 1777 - protein, 125 aa, Artificial Sequence
  Synthetic
QVQLVQSGAEVKKPGASVKVSCKASGYTFTGYYMHWVRQAPGQGLEWMGWINPISGGTNSAQKFQGRVTMTRDTSITTAYMELSSLRSDDTAVYHCAKSPYYYDSSGYLGGFDYWGQGTLVTVSS

SEQ ID NO: 1778 - protein, 18 aa, Artificial Sequence
  Synthetic
AKSPYYYDSSGYLGGFDY

SEQ ID NO: 1779 - protein, 110 aa, Artificial Sequence
  Synthetic
QSVLTQPASESGSPGQSITISCTGTSSDVGTYNLVSWYQQHPGKAPKLMIYEGSKRPSGVSNRFSGSKSGNTASLTISGLQAEDEADYYCCSYAASSTYVFGTGTKVTVL

SEQ ID NO: 1780 - protein, 10 aa, Artificial Sequence
  Synthetic
CSYAASSTYV

SEQ ID NO: 1781 - protein, 120 aa, Artificial Sequence
  Synthetic
QVQLVQSGAEVKKPGASVKVSCKASGYTFTSYYMHWVRQAPGQGLEWMGIINPSGGSTSYAQKFQGRVTMTRDTSTSTVYMELSSLRSEDTAVYYCARSSVTGTPPFDYWGQGTLVTVSS

SEQ ID NO: 1782 - protein, 13 aa, Artificial Sequence
  Synthetic
ARSSVTGTPPFDY

SEQ ID NO: 1783 - protein, 108 aa, Artificial Sequence
  Synthetic
SYVLTQPPSVSVAPGKTARITCGGNNIGSKSVHWYQQKPGQAPVLVIYYDSDRPSGIPERFSGSNSGNTAILTISRVEAGDEADYYCQVWDSSSDHVVFGGGTKLTVL

SEQ ID NO: 1784 - protein, 11 aa, Artificial Sequence
  Synthetic
QVWDSSSDHVV

SEQ ID NO: 1785 - protein, 122 aa, Artificial Sequence; identical to SEQ ID NO: 49
  Synthetic

SEQ ID NO: 1786 - protein, 14 aa, Artificial Sequence
  Synthetic
ARGSYSNYNGGLDY

SEQ ID NO: 1787 - protein, 110 aa, Artificial Sequence
  Synthetic
QSVLTQPPSASGSPGQSVTISCTGTSSDVGGYNYVSWYQQHPGKAPKLMIYEVSKRPSGVPDRFSGSKSGNTASLTVSGLQAEDEADYYCSSYAGSNNWVFGGGTKLTVL

SEQ ID NO: 1788 - protein, 10 aa, Artificial Sequence
  Synthetic
SSYAGSNNWV

SEQ ID NO: 1789 - protein, 120 aa, Artificial Sequence
  Synthetic
EVQLVESGGGLVQPGRSLRLSCAASGFTFDDYAMHWVRQAPGKGLEWVSGISWNSVSIDYADSVKGRFTISRDNAKNSLYLQMNSLRAEDTALYYCAKDGAGTENWFDPWGQGTLVTVSS

SEQ ID NO: 1790 - protein, 13 aa, Artificial Sequence
  Synthetic
AKDGAGTENWFDP

SEQ ID NO: 1791 - protein, 108 aa, Artificial Sequence
  Synthetic
SYVLTQPPSVSVAPGKTARITCGGNNIGSKSVHWYQQKPGQAPLLVIYYDSDRPSGIPERFSGSNSGNTATLTISRVEAGDETDYYCQVWDSSSDPHVVFGGGTKLTV

SEQ ID NO: 1792 - protein, 12 aa, Artificial Sequence
  Synthetic
QVWDSSSDPHVV

SEQ ID NO: 1793 - protein, 123 aa, Artificial Sequence
  Synthetic
QVQLVQSGAEVKKPGASVKVSCKASGYTFTDYYLHWVRQAPGQGLEWMGWINPTSGGTKYAQKFQGRVTMTRDTSITTAYMEVNRLRSDDTAVYYCARDRPLWFGVEYGMDVWGQGTTVTVSS

SEQ ID NO: 1794 - protein, 16 aa, Artificial Sequence
  Synthetic
ARDRPLWFGVEYGMDV

SEQ ID NO: 1795 - protein, 110 aa, Artificial Sequence
  Synthetic
QSVLTQPASVSGSPGQSITISCTGTNSDVGGYNYVSWYQQHPGKAPKLMIYDVGNRPSGVSNRFSGSKSGNTASLTISGLQAEDEADYYCSSYTSSSTLVFGGGTKLTVL

SEQ ID NO: 1796 - protein, 10 aa, Artificial Sequence
  Synthetic
SSYTSSSTLV

SEQ ID NO: 1797 - protein, 126 aa, Artificial Sequence
  Synthetic
QVQLVESGGGVVQPGRSLRLSCAASGFTFSSYGIHWVRQAPGKGLEWVAVIWYDGSNKYYADSVKGRFTISRDNSKNTLYLQMNSLRAEDTAVYYCAREYFYDSSDYYFEYYFDYWGQGTLVTVSS

SEQ ID NO: 1798 - protein, 19 aa, Artificial Sequence
  Synthetic
AREYFYDSSDYYFEYYFDY

SEQ ID NO: 1799 - protein, 110 aa, Artificial Sequence
  Synthetic
QSVLTQPRSVSGSPGQSVTISCTGTSSDVGGYNYVSWYQQHPGKAPKLMIYDVSKRPSGVPDRFSGSKSGNTASLTISGLQAEDEADYYCCSYAGSYTYVFGTGTKVTVL

SEQ ID NO: 1800 - protein, 10 aa, Artificial Sequence
  Synthetic
CSYAGSYTYV

SEQ ID NO: 1801 - protein, 124 aa, Artificial Sequence
  Synthetic
EVQLVESGGGLVQPGRSLRLSCAASGFTFDDYAMHWVRQAPGKGLEWVSGISWNSGSIGYADSVKGRFTISRDNAKNSLYLQMNSLRAEDTALYYCAKPRKRGDYYGSGSYDYWGQGTLVTVSS

SEQ ID NO: 1802 - protein, 17 aa, Artificial Sequence
  Synthetic
AKPRKRGDYYGSGSYDY

SEQ ID NO: 1803 - protein, 110 aa, Artificial Sequence
  Synthetic
QSVLTQPASVSGSPGQSITISCTGTSSDVGGYNYVSWYQQHPGKAPKLMIYDVSNRPSGVSNRFSGSKSGNTASLTISGLQAEDEADYYCSSYTSSSTVVFGGGTKLTVL

SEQ ID NO: 1804 - protein, 10 aa, Artificial Sequence
  Synthetic
SSYTSSSTVV

SEQ ID NO: 1805 - protein, 123 aa, Artificial Sequence
  Synthetic
  misc_feature (25)..(25): Xaa can be any naturally occurring amino acid
  misc_feature (32)..(32): Xaa can be any naturally occurring amino acid
  misc_feature (53)..(53): Xaa can be any naturally occurring amino acid
  misc_feature (80)..(80): Xaa can be any naturally occurring amino acid
  misc_feature (88)..(88): Xaa can be any naturally occurring amino acid
  misc_feature (122)..(123): Xaa can be any naturally occurring amino acid
QVQLVQSGAEVKKPGASVKVSCKAXGYTFTRXHMQWVGQAPGQGLEWMGIINXSGGSTSYAQKFQGRVTMARDTSTSSVXMELSSLRXRTRPCITVLVGISTIVVVRPAVWTSGAKGPRSPXX

SEQ ID NO: 1806 - protein, 17 aa, Artificial Sequence
  Synthetic
LVGISTIVVVRPAVWTS

SEQ ID NO: 1807 - protein, 115 aa, Artificial Sequence
  Synthetic
QSVLTQPSSHSASSGASVRLTCMLSSGFSVGDFWIRWYQQKPGNPPRYLLYYHSDSNKGQGSGVPSRFSGSNDASANAGILRISGLQPEDEADYYCGTWHSNSRVFGGGTKLTVL

SEQ ID NO: 1808 - protein, 9 aa, Artificial Sequence
  Synthetic
GTWHSNSRV

SEQ ID NO: 1809 - protein, 125 aa, Artificial Sequence
  Synthetic
QVQLVESGGGLVKPGGSLRLSCAASGFIFSDYCMSWIRRAPGKGLEWLSYISNSGTTRYYADSVKGRFTISRDNGRNSLYLQMDSLSAEDTAVYYCARRGDGSSSIYYYNYMDVWGKGTTVTVSS

SEQ ID NO: 1810 - protein, 18 aa, Artificial Sequence
  Synthetic
ARRGDGSSSIYYYNYMDV

SEQ ID NO: 1811 - protein, 110 aa, Artificial Sequence
  Synthetic
  misc_feature (110)..(110): Xaa can be any naturally occurring amino acid
QSVLTQPPSASGTPGQRVTVSCSGSSSNIGSNTVNWYQQLPGTAPKLLIYSNNQRPSGVPDRFSGSKSGTSASLAISGLQSEDEADYFCAAWDDSLNGPVFGGGTKLTVX

SEQ ID NO: 1812 - protein, 11 aa, Artificial Sequence
  Synthetic
AAWDDSLNGPV

SEQ ID NO: 1813 - protein, 120 aa, Artificial Sequence
  Synthetic
EVQLLESGGGLVQPGGSLRLSCAASGFTFSSYAMSWVRQAPGKGLEWVSGISDSGVSTYNADSVKGRFTISRDNSKNTLYLQMNSLRAEDTAVYYCAKVWSISLDAFDIWGQGTMVTVSS

SEQ ID NO: 1814 - protein, 13 aa, Artificial Sequence
  Synthetic
AKVWSISLDAFDI

SEQ ID NO: 1815 - protein, 106 aa, Artificial Sequence
  Synthetic
SYVLTQPPSVSVAPGKTARITCGGNNIGSKSVHWYQQKPGQAPVLVIYYDSDRPSGIPERFSGSNSGNTATLTISRVEAGDEADYYCQVWDSSSDLFGGGTKLTVL

SEQ ID NO: 1816 - protein, 9 aa, Artificial Sequence
  Synthetic
QVWDSSSDL

SEQ ID NO: 1817 - protein, 119 aa, Artificial Sequence
  Synthetic
EVQLVESGGGLVQPGGSLRLSCAASGFTFSSYWMSWVRQAPGKGLEWVTNIKLDGSEKYYVDSVKGRFTISRDNAKNSLYLQMNSLRAEDTAVYYCARLRWLRADFDYWGQGTLVTVSS

SEQ ID NO: 1818 - protein, 12 aa, Artificial Sequence
  Synthetic
ARLRWLRADFDY

SEQ ID NO: 1819 - protein, 110 aa, Artificial Sequence
  Synthetic
NFMLTQPHSVSESPGKTVTISCTGSSGSIASNYVQWYQQRPGSAPTTVIYEDNQRPSGVPDRFSGSIDSSSNSASLTISGLKTEDEADYYCQSYDSGNVVFGGGTKLTVL

SEQ ID NO: 1820 - protein, 9 aa, Artificial Sequence
  Synthetic
QSYDSGNVV

SEQ ID NO: 1821 - protein, 125 aa, Artificial Sequence
  Synthetic
QVQLVQSGAEVKKPGASVKVSCKASGYTFTGYYMHWVRQAPGQGLEWMGWINPNSGGTNYAQKFQGRVTMTRDTSISTAYMELSRLRSDDTAVYYCASTGYYILTGYEFGAMDVWGQGTTVTVSS

SEQ ID NO: 1822 - protein, 18 aa, Artificial Sequence
  Synthetic
ASTGYYILTGYEFGAMDV

SEQ ID NO: 1823 - protein, 109 aa, Artificial Sequence
  Synthetic
QSALTQPASVSGSPGQSITISCTGTSSDVGGYNYVSWYQQHPGKAPKLMIYDVSNRPSGVSNRFSGSKSGNTASLTISGLQAEDEADYYCSSYTSSSTVFGTGTKVTVL

SEQ ID NO: 1824 - protein, 9 aa, Artificial Sequence
  Synthetic
SSYTSSSTV

SEQ ID NO: 1825 - protein, 125 aa, Artificial Sequence
  Synthetic
QVQLVESGGGLVKPGGSLRLSCAASGFTFSDYCMSWIRQAPGKGLEWLSYISNSGTTRYYADSVKGRFTISRDNGRNSLYLQMNSLSAEDTAVYYCARRGDGSSSIYYYNYMDVWGKGTTVTVSS

SEQ ID NO: 1826 - protein, 18 aa, Artificial Sequence
  Synthetic
ARRGDGSSSIYYYNYMDV

SEQ ID NO: 1827 - protein, 110 aa, Artificial Sequence
  Synthetic
QSVLTQPPSASGTPGQRVTVSCSGSSSNIGSNTVNWYQQLPGTAPKLLIHSNNQRPSGVPDRFSGSKSGTSASLAISGLQSEDEADYYCAAWDDSLNGPVFGGGTKLTVL

SEQ ID NO: 1828 - protein, 11 aa, Artificial Sequence
  Synthetic
AAWDDSLNGPV

SEQ ID NO: 1829 - protein, 125 aa, Artificial Sequence; identical to SEQ ID NO: 1825
  Synthetic

SEQ ID NO: 1830 - protein, 18 aa, Artificial Sequence
  Synthetic
ARRGDGSSSIYYYNYMDV

SEQ ID NO: 1831 - protein, 110 aa, Artificial Sequence
  Synthetic
QSVLTQPPSASGTPGQRVTVSCSGSSSNIGSNTINWYQQLPGTAPKLLIYSNNQRPSGVPDRFSGSKSGTSASLAISGLQSEDEANYYCAAWDDSLNGPVFGGGTKLTVL

SEQ ID NO: 1832 - protein, 11 aa, Artificial Sequence
  Synthetic
AAWDDSLNGPV

SEQ ID NO: 1833 - protein, 128 aa, Artificial Sequence
  Synthetic
EVQLVESGGGLVQPGGSLRLSCAASGFTFSSYSMNWVRQAPGKGLEWVSYISSSSSTIYYADSVKGRFTISRDNAKNSLYLQMNSLRDEDTAVYYCAREAHDGALTDYGDYLNWFDPWGQGTLVTVSS

SEQ ID NO: 1834 - protein, 21 aa, Artificial Sequence
  Synthetic
AREAHDGALTDYGDYLNWFDP

SEQ ID NO: 1835 - protein, 110 aa, Artificial Sequence
  Synthetic
SYVLTQPPSVSVAPGKTARITCGGNNIGSKSVHWYQQKPGQAPVLVIYYDSDRPSGIPERFSGSNSGNTATLTISRVEAGDEADYYCQVWDSSSDHLYWVFGGGTKLTVL

SEQ ID NO: 1836 - protein, 13 aa, Artificial Sequence
  Synthetic
QVWDSSSDHLYWV

SEQ ID NO: 1837 - protein, 121 aa, Artificial Sequence
  Synthetic
QVQLQESGPGLVKPSQTLSLTCTVSGGSFSSGGYYWHWIRQHPGKGLEWIGYIYYSGSTYYNPSLKSRVTISVDTSKNQFSLKLSSVTAADTAVYYCARVATDYGDSFDYWGQGTLVTVSS

SEQ ID NO: 1838 - protein, 13 aa, Artificial Sequence
  Synthetic
ARVATDYGDSFDY

SEQ ID NO: 1839 - protein, 109 aa, Artificial Sequence
  Synthetic
QSVLTQEPSLTVSPGGTVTLTCASSTGAVTSGYYPSWFQQKPGQAPRALIYSTSNKHSWTPARFSGSLLGGKAALTLSGVQPEDEADYYCLLYYGGAWVFGGGTKLTVL

SEQ ID NO: 1840 - protein, 9 aa, Artificial Sequence
  Synthetic
LLYYGGAWV

SEQ ID NO: 1841 - protein, 122 aa, Artificial Sequence
  Synthetic
QVQLVQSGAEVKKPGASVKVSCKASGYIFTGYYMHWVRQAPGQGLEWMGWINPNSGGTNYAQKFQGRVTMTRDTSISTVYMELSRLRSDDTAVYYCARDLGFSRLQFLFDYWGQGTLVTVSS

SEQ ID NO: 1842 - protein, 15 aa, Artificial Sequence
  Synthetic
ARDLGFSRLQFLFDY

SEQ ID NO: 1843 - protein, 110 aa, Artificial Sequence
  Synthetic
QSVLTQPASVSGSPGQSITISCTGTSSDVGSYNLVSWYQQHPGKAPKLMIYEVSKRPSGVSNRFSGSKSGNTASLTISGLQAEDEADYYCCSYAGSSIVVFGGGTKLTVL

SEQ ID NO: 1844 - protein, 10 aa, Artificial Sequence
  Synthetic
CSYAGSSIVV

SEQ ID NO: 1845 - protein, 138 aa, Artificial Sequence; identical to SEQ ID NO: 961
  Synthetic

SEQ ID NO: 1846 - protein, 31 aa, Artificial Sequence; identical to SEQ ID NO: 962
  Synthetic

SEQ ID NO: 1847 - protein, 110 aa, Artificial Sequence
  Synthetic
QSVLTQPPSASGTPGQRVTISCSGSSSNIGSNSVNWFQQLPGTAPKLLIYSNNQRPSGVPDRFSGSKSGASASLAISGLQSEDEADYYCASWDDSLNGPLFGGGTKLTVL

SEQ ID NO: 1848 - protein, 11 aa, Artificial Sequence
  Synthetic
ASWDDSLNGPL

SEQ ID NO: 1849 - protein, 128 aa, Artificial Sequence
  Synthetic
EVQLVESGGGLVKPGGSLRLSCAASGFTFSTYNMNWVRQAPGKGLEWVSSITSSSSYIYYADSVKGRFTISRDNAENSLYLQMNSLRAEDTAVYYCARDRNRYDFWSGYYRLVGFDPWGQGTLVTVSS

SEQ ID NO: 1850 - protein, 21 aa, Artificial Sequence
  Synthetic
ARDRNRYDFWSGYYRLVGFDP

SEQ ID NO: 1851 - protein, 110 aa, Artificial Sequence
  Synthetic
QSVLTQPPSASGSPGQSVTISCTGTSSDVGGYKYVSWYQQHPGKAPKLMIYEVSKRPSGVPDRFSGSKSGNTASLTVSGLQAEDEADYYCSSYAGSNNHVFGGGTKLTVL

SEQ ID NO: 1852 - protein, 10 aa, Artificial Sequence
  Synthetic
SSYAGSNNHV

SEQ ID NO: 1853 - protein, 127 aa, Artificial Sequence
  Synthetic
EVQLVESGGGLVKPGGSLRLSCAASGFTFSDAWMSWVRQAPGKGLEWVGRLKSKTDGGTTDYAAPVKGRFTISRDDSKNTLSLQMNSLKTEDTAVYYCTTDQIYGDYLRMPVPFDYWGQGTLVTVSS

SEQ ID NO: 1854 - protein, 18 aa, Artificial Sequence
  Synthetic
TTDQIYGDYLRMPVPFDY

SEQ ID NO: 1855 - protein, 110 aa, Artificial Sequence
  Synthetic
QSVLTQPPSASGTPGQRVTISCSGSSSNIGSNYVYWYQQLPGTAPKLLIYRNNQRPSGVPDRFSGSKSGTSASLAISGLRSEDEADYYCATWDDSLSGPVFGGGTKLTVL

SEQ ID NO: 1856 - protein, 11 aa, Artificial Sequence
  Synthetic
ATWDDSLSGPV

SEQ ID NO: 1857 - protein, 123 aa, Artificial Sequence
  Synthetic
QVQLQESGPGLVKPSETLSLTCTVSGGSISSYYWSWIRQPAGKGLEWIGRIYTSGSTNYNPSLESRVTMSVDTSKNQFSLKLSSVTAADTAVYYCARVVGYSSRGANYYMDVWGKGTTVTVSS

SEQ ID NO: 1858 - protein, 17 aa, Artificial Sequence
  Synthetic
ARVVGYSSRGANYYMDV

SEQ ID NO: 1859 - protein, 111 aa, Artificial Sequence
  Synthetic
QSVLTQPPSVSGAPGQRVTISCTGSSSNIGAGYDVHWYQQLPGTAPKLLIYGNSNRPSGVPDRFSGSKSGTSASLAITGLQAEDEADYYCQSYDSSLSDSLFGGGTKLTVL

SEQ ID NO: 1860 - protein, 11 aa, Artificial Sequence
  Synthetic
QSYDSSLSDSL

SEQ ID NO: 1861 - protein, 125 aa, Artificial Sequence; identical to SEQ ID NO: 1033
  Synthetic

SEQ ID NO: 1862 - protein, 18 aa, Artificial Sequence
  Synthetic
ARAWAMRQTTLTPEWIDY

SEQ ID NO: 1863 - protein, 106 aa, Artificial Sequence
  Synthetic
SYVLTQPPSVSVSPGQTARITCSGDALPKQYAYWYQQKPGQAPVLVIYKDSERPSGIPERFSGSSSGTTVTLTISGVQAEDEADYYCQSADSRKVVFGGGTKLTVL

SEQ ID NO: 1864 - protein, 9 aa, Artificial Sequence
  Synthetic
QSADSRKVV

SEQ ID NO: 1865 - protein, 128 aa, Artificial Sequence
  Synthetic
QVQLQESGPGLVKPSETLSLTCTVSGGSISSYYWSWIRQPPGKGLEWIGYIYYSGSTNYNPSLKSRVTISVDTSKNQFSLKLSSVTAADTAVYYCARGGYYYDSSGYEYYYYYGMDVWGQGTTVTVSS

SEQ ID NO: 1866 - protein, 22 aa, Artificial Sequence
  Synthetic
ARGGYYYDSSGYEYYYYYGMDV

SEQ ID NO: 1867 - protein, 111 aa, Artificial Sequence
  Synthetic
QSVLTQPPSASGTPGQRVTISCSGSSSNIGSNYVYWYQQLPGTAPKLLIYRNNQRPSGVPDRFSGSKSGTSASLAISGLRSEDEADYYCAAWDDSLSGYWVFGGGTKLTVL

SEQ ID NO: 1868 - protein, 12 aa, Artificial Sequence
  Synthetic
AAWDDSLSGYWV

SEQ ID NO: 1869 - protein, 126 aa, Artificial Sequence
  Synthetic
EVQLVESGGGLVQPGRSLRLSCAASGFTFDDYAMHWVRQAPGKGLEWVSGTSWNSGTIGYADSVKGRFTISRDNAKNSLYLQMNSLRAEDTALYYCAKGRVVYAIDPDSVSPFDYWGQGTLVTVSS

SEQ ID NO: 1870 - protein, 19 aa, Artificial Sequence
  Synthetic
AKGRVVYAIDPDSVSPFDY

SEQ ID NO: 1871 - protein, 111 aa, Artificial Sequence
  Synthetic
QSVLTQPASVSGSPGQSITISCTGTSSGVGGYNFVSWYQQHPGKAPKLMIYDVSNRPSGVSNRFSGSKSGNTASLTISGLQAEDEADYHCSSYTSRSTLGVFGGGTKLTVL

SEQ ID NO: 1872 - protein, 11 aa, Artificial Sequence
  Synthetic
SSYTSRSTLGV

SEQ ID NO: 1873 - protein, 125 aa, Artificial Sequence
  Synthetic
QVQLQESGPGLVKPSETLSLTCTVSGGSISSYYWSWIRQPPGKGLEWIGYIYYSGSTNYNPSLKSRVTISVDTSKNQFSLKLSSVTAADTAVYYCARYGMGELLTLRSEYYFDYWGQGTLVTVSS

SEQ ID NO: 1874 - protein, 19 aa, Artificial Sequence
  Synthetic
ARYGMGELLTLRSEYYFDY

SEQ ID NO: 1875 - protein, 110 aa, Artificial Sequence
  Synthetic
QSVLTQPRSVSGSPGQSVTISCTGTSSDVGGYNYVSWYQQHPGKAPKLMIYDVSKRPSGVPDRFSGSKSGNTASLTISGLQAEDEADYYCYSYAGSYTFVFGGGTKLTVL

SEQ ID NO: 1876 - protein, 10 aa, Artificial Sequence
  Synthetic
YSYAGSYTFV

SEQ ID NO: 1877 - protein, 124 aa, Artificial Sequence
  Synthetic
EVQLLESGGGLVQPGGSLRLSCAASGFTFSSYAMSWVRQAPGKGLEWVSAISGSGGTTYYADSVKGRFTISRDNSKNTLYLQMNSLRAEDTAVYYCAKVPIHYCSNGVCYFDYWGQGTLVTVSS

SEQ ID NO: 1878 - protein, 17 aa, Artificial Sequence
  Synthetic
AKVPIHYCSNGVCYFDY

SEQ ID NO: 1879 - protein, 111 aa, Artificial Sequence
  Synthetic
NFMLTQPHSVSESPGKTVTISCTGSSGSIASNYVQWYQQRPGSAPTTVIYEDNQRPSGVPDRFSGSIDSSSNSASLTISGLKTEDEADYYCQSYDSSNRWVFGGGTKLTVL

SEQ ID NO: 1880 - protein, 10 aa, Artificial Sequence
  Synthetic
QSYDSSNRWV

SEQ ID NO: 1881 - protein, 122 aa, Artificial Sequence
  Synthetic
EVQLVESGGGLVQPGRSLRLSCAASGFTFDDYAMHWVRQAPGKGLEWVSGISWNSGSIGYAHSVKGRFTISRDNAKNSLYLHMNSLRAEDTALYYCAKDMLGNYYYYAMVVWGQGTTVTVSS

SEQ ID NO: 1882 - protein, 15 aa, Artificial Sequence
  Synthetic
AKDMLGNYYYYAMVV

SEQ ID NO: 1883 - protein, 112 aa, Artificial Sequence
  Synthetic
QSALTQPASVSGSPGQSITISCTGTSSDVGGYNYVSWYQHHPGKAPKLMIYDVSNRPSGVSNRFSGSKSGNTASLTISGLQAEDEADYYCSSYTSSSTLEGVFGGGTKLTVL

SEQ ID NO: 1884 - protein, 12 aa, Artificial Sequence
  Synthetic
SSYTSSSTLEGV

SEQ ID NO: 1885 - protein, 121 aa, Artificial Sequence; identical to SEQ ID NO: 47
  Synthetic

SEQ ID NO: 1886 - protein, 14 aa, Artificial Sequence
  Synthetic
ARGGQDELTGAFDI

SEQ ID NO: 1887 - protein, 105 aa, Artificial Sequence
  Synthetic
SYVLTQPPSVSVAPGKTARITCGGNSIGSKSVHWYQQKPGQAPVLVIYYDSDRPSGIPERFSGSNSGNTATLTISRVEAGDEADFHCQVWDSGWVFGGGTKLTVL

SEQ ID NO: 1888 - protein, 8 aa, Artificial Sequence
  Synthetic
QVWDSGWV

SEQ ID NO: 1889 - protein, 120 aa, Artificial Sequence
  Synthetic
QVQLVQSGAEVKKPGASVKVSCKASGYTFTSYYMHWVRQAPGQGLEWMGIINPSGGSTSYAQKFQGRVTMTRDTSTSTVYMELSSLRSEDTAVYYCARVPREGTPGFDPWGQGTLVTVSS

SEQ ID NO: 1890 - protein, 13 aa, Artificial Sequence
  Synthetic
ARVPREGTPGFDP

SEQ ID NO: 1891 - protein, 108 aa, Artificial Sequence
  Synthetic
SYVLTQPPSVSVAPGKTARITCGENNIGSKSVHWYQQKPGQAPVLVIYYDSDRPSGIPERFSGSNSGNTATLTINRVEAGDEADYYCQVWDSSSDHVVFGGGTKLTVL

SEQ ID NO: 1892 - protein, 11 aa, Artificial Sequence
  Synthetic
QVWDSSSDHVV

SEQ ID NO: 1893 - protein, 123 aa, Artificial Sequence
  Synthetic
EVQLVESGGGLVQPGGSLRLSCAASGFTFSSYSMNWVRQAPGKGLEWVSYISSSSSTIYYADSVKGRFTISRDNAKNSLYLQMNSLRAEDTAVYYCARDSGGDIVVIPAVNGFDYWGQGTLVT

SEQ ID NO: 1894 - protein, 19 aa, Artificial Sequence
  Synthetic
ARDSGGDIVVIPAVNGFDY

SEQ ID NO: 1895 - protein, 105 aa, Artificial Sequence
  Synthetic
SYVLTQPPSVSVSPGQTARITCSGDALPNQYAYWYQQKPGQAPVLVIYKDSERPSGIPERFSGSSSGTTVTLTISGVQAEDEADYYCQSADSRGVFGGGTKLTVL

SEQ ID NO: 1896 - protein, 8 aa, Artificial Sequence
  Synthetic
QSADSRGV

SEQ ID NO: 1897 - protein, 121 aa, Artificial Sequence
  Synthetic
QVQLVESGGGVVQPGRSLRLSCAASGFTFSSYAMHWVRQAPGKGLEWVAVISYDGSNKYYADSVKGRFTISRDNSKNTLYLQMNSLRAEDTAVYYCATEDYYDSSGSFDYWGQGTLVTVSS

SEQ ID NO: 1898 - protein, 14 aa, Artificial Sequence
  Synthetic
ATEDYYDSSGSFDY

SEQ ID NO: 1899 - protein, 109 aa, Artificial Sequence
  Synthetic
QSVLTQPRSVSGSPGQSVTISCTGTSSDVGGYNYVSWYQQHPGKAPKLMIYDVSKRPSGVPDRFSGSKSGNTASLTISGLQAEDEADYYCCSYAGSFWVFGGGTKLTVL

SEQ ID NO: 1900 - protein, 9 aa, Artificial Sequence
  Synthetic
CSYAGSFWV

SEQ ID NO: 1901 - protein, 122 aa, Artificial Sequence
  Synthetic
QVQLVQSGAEVKKPGASVKVSCMASGYTFTGYYMHWVRQAPGQGLEWMGWINPNSGGTNYAQKFQGRVTMTRDTSISTAYMELSRLRSDDTAVYYCARDSPFSALGASNDYWGQGTLVTVSS

SEQ ID NO: 1902 - protein, 15 aa, Artificial Sequence
  Synthetic
ARDSPFSALGASNDY

SEQ ID NO: 1903 - protein, 110 aa, Artificial Sequence
  Synthetic
QSALTQPPSASGSPGQSVTISCTGTSSDVGGYNYVSWYQQHPGKAPKLMIYEVSKRPSGVPDRFSGSKSGNTASLTVSGLQAEDEAEYYCSSDAGSNNVVFGGGTKLTVL

SEQ ID NO: 1904 - protein, 10 aa, Artificial Sequence
  Synthetic
SSDAGSNNVV

SEQ ID NO: 1905 - protein, 128 aa, Artificial Sequence
  Synthetic
QVQLVQSGAEVKKPGSSVKVSCKASGGTFSSYAISWVRQAPGQGLEWMGGIIPIFGTANYAQKFQGRVTITADKSTSTAYMELSSLRSEDTAVCYCARVGYYYDRSGFPRTEDYFDYWGQGTLVTVSS

SEQ ID NO: 1906 - protein, 21 aa, Artificial Sequence
  Synthetic
ARVGYYYDRSGFPRTEDYFDY

SEQ ID NO: 1907 - protein, 111 aa, Artificial Sequence
  Synthetic
QSVLTQPPSVSGAPGQRVTISCTGSSSNIGAGYDVHWYQQLPGTAPKLLIYGNSNRPSGVPDRFSGSKSGTSASLAITGLQAEDEADYYCQSYDSSLSGVVFGGGTKLTVL

SEQ ID NO: 1908 - protein, 11 aa, Artificial Sequence
  Synthetic
QSYDSSLSGVV

SEQ ID NO: 1909 - protein, 113 aa, Artificial Sequence
  Synthetic
QVQLVESGGGVVQPERSLRLSCAASGFTFSSYAMHWVRQAPGKGLEWVAVISYDGSNKYYADSVKGRFTISRDNSKNTLYLQMNSLRAEDTAVYYCARSKSYTSWGYYHMDVW

SEQ ID NO: 1910 - protein, 16 aa, Artificial Sequence
  Synthetic
ARSKSYTSWGYYHMDV

SEQ ID NO: 1911 - protein, 110 aa, Artificial Sequence
  Synthetic
QSVLTQPASVSGSPGQSITISCAGTSSDVGAYNYVSWYQQHPGKAPKLMIYDVSNRPSGVSNRFSGSKSGNTASLTISGLQAEDEADYYCSSYTSSSTWVFGGGTKLTVL

SEQ ID NO: 1912 - protein, 10 aa, Artificial Sequence
  Synthetic
SSYTSSSTWV

SEQ ID NO: 1913 - protein, 122 aa, Artificial Sequence
  Synthetic
QVQLQESGPGLVKPSETLSLTCTVSGGSISSYYWSWIRQPPGKGLEWIGYIYYSGSTNYNPSLKSRVTISVDTSKNQFSLKLSSVTAADTAVYYCARSYDSSGLSYNWFDPWGQGTLVTVSS

SEQ ID NO: 1914 - protein, 16 aa, Artificial Sequence
  Synthetic
ARSYDSSGLSYNWFDP

SEQ ID NO: 1915 - protein, 112 aa, Artificial Sequence
  Synthetic
QSVLTQPPSVSGAPGQRVTISCTGSSSNIGAGYDVHWYQQLPGTAPKLLIYGNSNRPSGVPDRFSGSKSGTSASLAITGLQAEDEADYYCQSYDSSLSGYVVFGGGTKLTVL

SEQ ID NO: 1916 - protein, 12 aa, Artificial Sequence
  Synthetic
QSYDSSLSGYVV

SEQ ID NO: 1917 - protein, 124 aa, Artificial Sequence
  Synthetic
  misc_feature (118)..(118): Xaa can be any naturally occurring amino acid
EVQLVESGGGLVKPGGSLRLSCAASGFTFSSYSMNWVRQAPGKGLEWVSSISSSSSYIYYADSVKGRFTISRDNAKNSLYLQMNSLRAEDTAVYYCAREVKRVVAAPEYYFDYWGQGXLVTVSS

SEQ ID NO: 1918 - protein, 17 aa, Artificial Sequence
  Synthetic
AREVKRVVAAPEYYFDY

SEQ ID NO: 1919 - protein, 110 aa, Artificial Sequence
  Synthetic
QSVLTQPPSASGTPGQRVTISCSGISSNLGSNTVNWFQQLPGTAPKLLIYNSNRRPSGVPDRFSGSKSGTSASLAISGLQSEDEGDYYCAEWDDSLSTWVFGGGTHLTVL

SEQ ID NO: 1920 - protein, 11 aa, Artificial Sequence
  Synthetic
AEWDDSLSTWV

SEQ ID NO: 1921 - protein, 120 aa, Artificial Sequence
  Synthetic
QVQLVESGGGVVQPGRSLRLSCAASGFTFSSYVMNWVRQAPGKGLAWVAVISFDGSNKYYADSVKGRFTVSRDNSKNTLYLQMNSLRAEDTALYYCARGPGWQWPELDYWGQGTLVTVSS

SEQ ID NO: 1922 - protein, 13 aa, Artificial Sequence
  Synthetic
ARGPGWQWPELDY

SEQ ID NO: 1923 - protein, 110 aa, Artificial Sequence
  Synthetic
QSVLTQPPSASGTPGQRVTISCSGSSSNIGSNTVNWYQQLPGTGPKLLIYSNNERPSGVPDRFSGSKSGTSASLAISGLQPEDEADYYCAAWDDSLNGPVFGTGTKVTVL

SEQ ID NO: 1924 - protein, 11 aa, Artificial Sequence
  Synthetic
AAWDDSLNGPV

SEQ ID NO: 1925 - protein, 124 aa, Artificial Sequence
  Synthetic
QVQLVESGGGVVQPGRSLRLSCAASGFTFTSYGMHWVRQAPGKGLEWVAVIWYDGSNKYYADSVKGRFTISRDNSKNTLYLQMNSLRAEDTAVYYCARDMMIRGVAWYYYMDVWGKGTTVTVSS

SEQ ID NO: 1926 - protein, 17 aa, Artificial Sequence
  Synthetic
ARDMMIRGVAWYYYMDV

SEQ ID NO: 1927 - protein, 109 aa, Artificial Sequence
  Synthetic
QSVLTQPASVSGSPGQSITISCTGTSSDVGGYNYVSWYQQHPGKAPKLIIYNVSNRPSGVSNRFSGSKSGNTASLTISGLQAEDEADYYCSSYISSNTVFGGGTKLTVL

SEQ ID NO: 1928 - protein, 9 aa, Artificial Sequence
  Synthetic
SSYISSNTV

SEQ ID NO: 1929 - protein, 126 aa, Artificial Sequence
  Synthetic
EVQLVESGGGLVQPGRSLRLSCAASGFTFDDYAMHWVRQAPGKGLEWVSGVTWNSGSIGYADSVKGRFIISRDNAKNSLYLQMNSLRAEDTALYYCAKGGEGFRNWNDGLDYFDYWGQGTLVTVSS

SEQ ID NO: 1930 - protein, 19 aa, Artificial Sequence
  Synthetic
AKGGEGFRNWNDGLDYFDY

SEQ ID NO: 1931 - protein, 110 aa, Artificial Sequence
  Synthetic
QSVLTQPPSASGTPGQRVTISCSGSSSNIGSNTVNWYQQLPGTAPKLLIYSNNQRPSGVPDRFSGSKSGTSASLAISGLQSEDEADYYCAAWDDSLNGYVFGTGTKVTVL

SEQ ID NO: 1932 - protein, 11 aa, Artificial Sequence
  Synthetic
AAWDDSLNGYV

SEQ ID NO: 1933 - protein, 125 aa, Artificial Sequence
  Synthetic
QVQLQESGPGLVKPSQTLSLTCTVSGGSISSGGYYWSWIRQHPGKGLEWIGYIYYSGSPYYNPSLKSRVTISIDTSKNQFSLKLSSVTAADTAVYYCARVHVVRGVANYPYFDYWGQGTLVTVSS

SEQ ID NO: 1934 - protein, 17 aa, Artificial Sequence
  Synthetic
ARVHVVRGVANYPYFDY

SEQ ID NO: 1935 - protein, 111 aa, Artificial Sequence
  Synthetic
  misc_feature (3)..(4): Xaa can be any naturally occurring amino acid
QSXXTQPRSVSGSPGQSVTISCTGTSSDVGGYNCVSWYQQHPGKAPKLMIYDVSKRPSGVPDRFSGSKSGNTASLTISGLQAEDEADYYCCSYAGSYTPWVFGGGTKLTVL

SEQ ID NO: 1936 - protein, 11 aa, Artificial Sequence
  Synthetic
CSYAGSYTPWV

SEQ ID NO: 1937 - protein, 120 aa, Artificial Sequence
  Synthetic
QVQLVESGGGVVQPGRSLRLSCAASGFTFSSYCMHWVRQAPGKGLEWVAVIWYDGNNKYYADSVKGRFTISRDNSKNTLYLQMNSLRAEDTAVYYCAREKDIVATDFDYWGQGTLVTVSS

SEQ ID NO: 1938 - protein, 13 aa, Artificial Sequence
  Synthetic
AREKDIVATDFDY

SEQ ID NO: 1939 - protein, 112 aa, Artificial Sequence
  Synthetic
QSVLTQPPSVSGAPGQRVTISCTGSSSNIGAGYDVHWYQQLPGTAPKLLIYGNSNRPSGVPDRFSGSKSGTSASLAITGLQAEDEADYYCQSYDSSLSGPYVFGTGTKVTVL

SEQ ID NO: 1940 - protein, 12 aa, Artificial Sequence
  Synthetic
QSYDSSLSGPYV

SEQ ID NO: 1941 - protein, 116 aa, Artificial Sequence
  Synthetic
EVQLLESGGGLVQPGGSLRLSCAASGFTFGTYAMSWVRQAPGKGLEWVSAISGRGDSTYYADSVKGRFTISRDNSKNTLYLQMNSLRAEDTAVYYCVTRWLVLNSWGQGTLVTASS

SEQ ID NO: 1942 - protein, 9 aa, Artificial Sequence
  Synthetic
VTRWLVLNS

SEQ ID NO: 1943 - protein, 109 aa, Artificial Sequence
  Synthetic
QSVLTQPASESGSPGQSITISCTGTSNDIGSYNPVSWYQQHPGKVPKLMIYEGSKGPSGVSNRFSGSKSGTTASLTISGLQAEDEADYNCRSYASHTWVFGGGTKLTVL

SEQ ID NO: 1944 - protein, 9 aa, Artificial Sequence
  Synthetic
RSYASHTWV

SEQ ID NO: 1945 - protein, 124 aa, Artificial Sequence
  Synthetic
QVQLVESGGGLVKPGGSLRLSCAASGFTFSDYYMSWVRQAPGKGLEWVSNISGGGSIVYYADSVKGRFTISRDNAKNSLYLQMNSLRAEDTAVYYCARGESVLLWFGGDGMDVWGQGTTVTVSS

SEQ ID NO: 1946 - protein, 17 aa, Artificial Sequence
  Synthetic
ARGESVLLWFGGDGMDV

SEQ ID NO: 1947 - protein, 112 aa, Artificial Sequence
  Synthetic
QSVLTQPPSVSGAPGQRVTISCTGSSSSIGADYDVHWYQQLPGTAPKLLIYGNSNRPSGVPDRFSGSKSGTSASLAITGLQAEDEADYYCQSYDSNLSGHVVFGGGTKVTVL

SEQ ID NO: 1948 - protein, 12 aa, Artificial Sequence
  Synthetic
QSYDSNLSGHVV

SEQ ID NO: 1949 - protein, 122 aa, Artificial Sequence
  Synthetic
QVQLVQSGAEVKKPGASVKVSCKASGYTFSSNYIHWVRQAPGQGLEWMGIINPSAGSTTYAQKFQGRVTMTGDTSTSTVYMELSSLRSEDTAVYYCARGGWVPDVRGEFDPWGQGTLVTVSS

SEQ ID NO: 1950 - protein, 15 aa, Artificial Sequence
  Synthetic
ARGGWVPDVRGEFDP

SEQ ID NO: 1951 - protein, 110 aa, Artificial Sequence
  Synthetic
QSVLTQPPSASGTPGQRVTISCSGSSSNIGSRTVSWSQQFPGTAPKLLIYSNNQRPSGVPDRFSGSKSGTSASLAISGLQSEDEADYYCAAWDDSLNGWVFGGGTKLTVL

SEQ ID NO: 1952 - protein, 11 aa, Artificial Sequence
  Synthetic
AAWDDSLNGWV

SEQ ID NO: 1953 - protein, 119 aa, Artificial Sequence
  Synthetic
EVQLVESGGGLVQPGGSLRLSCAVSGFTFSSYWMSWVRQAPGKGLEWVADIKEDGSEKYYVDSVKGRFTISRDNAKNSVFLQMKSLRAEDTAVYFCASKVWLRGAFDSWGQGTLVTVSS

SEQ ID NO: 1954 - protein, 12 aa, Artificial Sequence
  Synthetic
ASKVWLRGAFDS

SEQ ID NO: 1955 - protein, 111 aa, Artificial Sequence
  Synthetic
NFMLTQPHSVSESPGKTVTISCTGSSGNIASNYVQWYQQRPGSAPTTVIYEDNQRPSGVPDRFSGSIDSSSNSASLTISGLKTEDEADYYCQSYEYSKHVVFGGGTKLTVL

SEQ ID NO: 1956 - protein, 10 aa, Artificial Sequence
  Synthetic
QSYEYSKHVV

SEQ ID NO: 1957 - protein, 120 aa, Artificial Sequence; identical to SEQ ID NO: 67
  Synthetic

SEQ ID NO: 1958 - protein, 13 aa, Artificial Sequence
  Synthetic
ARAIVGTKGYMDV

SEQ ID NO: 1959 - protein, 109 aa, Artificial Sequence
  Synthetic
QSVLTQPASVSGSPGQSVTISCTGTRSDVGSYDLVSWYQLHADKAPKLIIYEVTSRPSGISTRFSGSKSGNTASLTISGLQAEDEADYYCCSYAGTTWLFGGGTRLTVL

SEQ ID NO: 1960 - protein, 9 aa, Artificial Sequence
  Synthetic
CSYAGTTWL

SEQ ID NO: 1961 - protein, 122 aa, Artificial Sequence
  Synthetic
QVQLVESGGGLVKPGGSLRLSCAASGFIFSDYYMSWIRQAPGKGLEWVSSISSAGDSTYYADSVKGRFTISGDNAKSSLFLQMNSLRADDTAVYYCARDLIGQGADDAFDIWGQGTLVTVSS

SEQ ID NO: 1962 - protein, 15 aa, Artificial Sequence
  Synthetic
ARDLIGQGADDAFDI

SEQ ID NO: 1963 - protein, 108 aa, Artificial Sequence
  Synthetic
SYVLTQPPSVSVAPGNTARITCGGNNIGSKSVHWYQQKPDQAPVLVIFYDSDRPSGIPERFSGSNSGNTATLTISRVEAGDEADYYCQVWDSISDHVVFAGGTKLTVL

SEQ ID NO: 1964 - protein, 11 aa, Artificial Sequence
  Synthetic
QVWDSISDHVV

SEQ ID NO: 1965 - protein, 119 aa, Artificial Sequence
  Synthetic
EVQLVESGGGLVQPGGSLRLSCAASGFTFNNHWMTWVRQAPGKGLEWVANIKQDGSEKQYVESVKGRFTISRDNAKNSLYLQMNRLRAEDTAVYYCARVLIYYEGPDFWGQGTLVTVSS

SEQ ID NO: 1966 - protein, 12 aa, Artificial Sequence
  Synthetic
ARVLIYYEGPDF

SEQ ID NO: 1967 - protein, 110 aa, Artificial Sequence
  Synthetic
NFMLTQPHSVSGSPGKTVTISCTASSGSIATNYVQWYQQRPGSAPNTVIYEDNQRPSGVPDRFSGSIDSSSNSASLTISGLRTEDEADYYCQSYGGSHWVFGGGTRLTVL

SEQ ID NO: 1968 - protein, 9 aa, Artificial Sequence
  Synthetic
QSYGGSHWV

SEQ ID NO: 1969 - protein, 120 aa, Artificial Sequence
  Synthetic
QVQLVESGGALVKPGGSLRLSCAASGFTFSDYYMSWIRQAPGKGLEWISYISGGGNTLYYAASVKGRFTISRDNAKKSLFLQMNSLRAEDTAVYYCARDLTGRLEYFDSWGQGTLVTVSS

SEQ ID NO: 1970 - protein, 13 aa, Artificial Sequence
  Synthetic
ARDLTGRLEYFDS

SEQ ID NO: 1971 - protein, 107 aa, Artificial Sequence
  Synthetic
SYVLTQPPSASVAPGQTARLTCGGSEIGSKNVHWYQQRAGQAPVLVIFYDSDRPSGIPERFSGSNSGNTATLTISRVEAGDEADYFCQTWDSGADHVIFGGGTKLTV

SEQ ID NO: 1972 - protein, 11 aa, Artificial Sequence
  Synthetic
QTWDSGADHVI

SEQ ID NO: 1973 - protein, 122 aa, Artificial Sequence
  Synthetic
EVQLVESGGGLVKPGGSLRLSCAASGFSFSDAWMSWVRQAPGKGLEWVGRIKSEFDGGTTDYAAPVKGRFTISRDDSKNTLFLQLNSLKTEDTAVYYCSTAALELGLFFDFWGQGTLVTVSS

SEQ ID NO: 1974 - protein, 13 aa, Artificial Sequence
  Synthetic
STAALELGLFFDF

SEQ ID NO: 1975 - protein, 109 aa, Artificial Sequence
  Synthetic
QSVLTQPPSASGTPGQRISISCSGSSFNIGSNYVYWYQQLPGTAPKLLIYRNNQRPSGIPDRFSGSKSGTSASLAISGLRSEDEADYYCATWDDSVRGWGFGGGTKLTV

SEQ ID NO: 1976 - protein, 11 aa, Artificial Sequence
  Synthetic
ATWDDSVRGWG

SEQ ID NO: 1977 - protein, 117 aa, Artificial Sequence
  Synthetic
QVQLQQWGAGLLKPSETLSLTCAVYGDSFIGPYWTWIRQPPGKELEWIGEINHSGSTDFNPSLKSRVTISVDTSKNQFSLKLSSVTAADTGVYYSARGVAAANFDYWGQGILVTVSS

SEQ ID NO: 1978 - protein, 11 aa, Artificial Sequence
  Synthetic
ARGVAAANFDY

SEQ ID NO: 1979 - protein, 111 aa, Artificial Sequence
  Synthetic
QSVLTQPASVSGSPGQSITISCTGTSSDVGSYNYVSWYQQHPGKAPKLMIYDVSNRPSGVSNRFSGSKSGNTASLTISGLQAEDEADYYCSSYTSSHTLYVFGTGTKVTVL

SEQ ID NO: 1980 - protein, 11 aa, Artificial Sequence
  Synthetic
SSYTSSHTLYV

SEQ ID NO: 1981 - protein, 124 aa, Artificial Sequence
  Synthetic
EVQLVESGGGLVQPGRSLRLSCAASGFTFDDFAMHWVRQAPGKGLEWVSGISWNSGSIGQADSVKGRFTISRDNAKNSLYLQMNSLRAEDTALYYCVKDIAMVVGGLTEGFDYWGQGTLVSVSS

SEQ ID NO: 1982 - protein, 17 aa, Artificial Sequence
  Synthetic
VKDIAMVVGGLTEGFDY

SEQ ID NO: 1983 - protein, 108 aa, Artificial Sequence
  Synthetic
SYVLTQPSSVSVSPGQTANIPCSGDQLGDQYACWYQQKPGQSPVLVIYQDTKRPSGIPERFSGSNSGNTATLTISGTQAMDEADYYCQAWDSSTAHFVFGTGTKVTVL

SEQ ID NO: 1984 - protein, 11 aa, Artificial Sequence
  Synthetic
QAWDSSTAHFV

SEQ ID NO: 1985 - protein, 128 aa, Artificial Sequence; identical to SEQ ID NO: 9
  Synthetic

SEQ ID NO: 1986 - protein, 21 aa, Artificial Sequence
  Synthetic
AREAHDGALTGYGDYLNWFDP

SEQ ID NO: 1987 - protein, 110 aa, Artificial Sequence
  Synthetic
SYVLTQPPSVSVAPGKTARIPCGGDSVGSKSVHWYQQKSGQAPVLVIHSDSDRPSGIPERFSGSNSGNTATLTITGVAAGDEADYYCHVWDTIGDRFYWVFGGGTKLTVL

SEQ ID NO: 1988 - protein, 13 aa, Artificial Sequence
  Synthetic
HVWDTIGDRFYWV

SEQ ID NO: 1989 - protein, 126 aa, Artificial Sequence
  Synthetic
QVQLVESGGGVVQPGRSLRLSCAASGFTFSYYGMHWVRQAPGKGLEWVAVISHDGSNKYYVDSVKGRFTISRDNSKNALELQMNSLRVEDTAVYYCAKFPDSKWNYEFDYYGMDVWGQGTTVTVSS

SEQ ID NO: 1990 - protein, 19 aa, Artificial Sequence
  Synthetic
AKFPDSKWNYEFDYYGMDV

SEQ ID NO: 1991 - protein, 110 aa, Artificial Sequence
  Synthetic
QSVLTQPASVSGSPGQSITFSCTGTSSDVGGYNYVSWYQQYPGKAPKLLIYDVTNRPSGVSDRFSGSKSGNTASLTISGLQVEDEADYYCSSFTSSNTRVFGTGTKVTVL

SEQ ID NO: 1992 - protein, 10 aa, Artificial Sequence
  Synthetic
SSFTSSNTRV

SEQ ID NO: 1993 - protein, 121 aa, Artificial Sequence; identical to SEQ ID NO: 33
  Synthetic

SEQ ID NO: 1994 - protein, 14 aa, Artificial Sequence
  Synthetic
ARGSYSDYNGGWDY

SEQ ID NO: 1995 - protein, 109 aa, Artificial Sequence
  Synthetic
QSVLTQPPSASGSPGQSVTISCIGTSSDVGGYNYVSWYQHHPGKAPKLIIYEVSKRPSGVPDRFSGSKSGNTASLTVSGLQADDEADYYCSSYAGSNNWVFGGGTKLTV

SEQ ID NO: 1996 - protein, 10 aa, Artificial Sequence
  Synthetic
SSYAGSNNWV

SEQ ID NO: 1997 - protein, 119 aa, Artificial Sequence
  Synthetic
QVQLVQSGAEVKKAGASMKVSCKASGYTFPSYGVSWVRQAPGQGLEWMGWISPYNGNTKYAQKFQGRVTMTTDTSTNTAYMELRSLRSDDTAVYYCARDGELMGWFDPWGQGTLVTVSS

SEQ ID NO: 1998 - protein, 12 aa, Artificial Sequence
  Synthetic
ARDGELMGWFDP

SEQ ID NO: 1999 - protein, 110 aa, Artificial Sequence
  Synthetic
QSVLTQPASESGSPGQSITISCTGTSSDVGSYNLVSWYQQQTGKAPKLMIYAGSKRPSGVSNRFSGSKSGNTASLTISGLQAEDEADYYCCSYAGGSTWVFGGGTKLTVL

SEQ ID NO: 2000 - protein, 10 aa, Artificial Sequence
  Synthetic
CSYAGGSTWV

SEQ ID NO: 2001 - protein, 122 aa, Artificial Sequence
  Synthetic
QVQLVQSGAEVKKPGASVKVSCRASGYTFTGHYIHWVRQAPGQGLEWMGWINPNSGATNYAQNFQGRVTMTRDTSIITAYMELRSLRSDDTAVYYCARDLGFSRLQVFFDNWGQGTLVTVSS

SEQ ID NO: 2002 - protein, 15 aa, Artificial Sequence
  Synthetic
ARDLGFSRLQVFFDN

SEQ ID NO: 2003 - protein, 110 aa, Artificial Sequence
  Synthetic
QSVLTQPASVSGSPGQSITISCTGTSSDVGSYNLVSWYQQYPGEAPKLIIYEVNKRPSGVSNRFSGSKSGNTASLTISGLQAGDEAHYYCCSDVGRNNALFGGGTKLTVL

SEQ ID NO: 2004 - protein, 10 aa, Artificial Sequence
  Synthetic
CSDVGRNNAL

SEQ ID NO: 2005 - protein, 123 aa, Artificial Sequence
  Synthetic
QVQLQESGPGLVKPSQTLSLTCTVSGGSISIGGFYWSWIRQHPGKGLEWIGFIHYSESTYYNPSLKSRVTISIDTSKNQFSLQLSSVTAADTAVYYCARWLSGYHPDDAFDIWGQGTMVTVSS

SEQ ID NO: 2006 - protein, 15 aa, Artificial Sequence
  Synthetic
ARWLSGYHPDDAFDI

SEQ ID NO: 2007 - protein, 109 aa, Artificial Sequence
  Synthetic
QSVLTQPRSVSGSPGQSVTISCTGTSSDVGAYNYVSWYQHHPGKAPKLMIYDVSKRPSGVPDRFSGSKSGNTASLTISGLQAEDEADYHCCSYAGSYVVFGGGTKLTVL

SEQ ID NO: 2008 - protein, 9 aa, Artificial Sequence
  Synthetic
CSYAGSYVV

SEQ ID NO: 2009 - protein, 125 aa, Artificial Sequence
  Synthetic
QVQLVESGGGLVKPGGSLTLSCAGAGFNFSDYCLTWIRQAPGKGLECLSYICSGADETYIADSVKGRFTISRDNAKNSLYLKMSSLRAEDTAVYYCARRGDGNTPIYHYYYMDVWGKGTTVTVSS

SEQ ID NO: 2010 - protein, 18 aa, Artificial Sequence
  Synthetic
ARRGDGNTPIYHYYYMDV

SEQ ID NO: 2011 - protein, 110 aa, Artificial Sequence; identical to SEQ ID NO: 2
  Synthetic

SEQ ID NO: 2012 - protein, 11 aa, Artificial Sequence
  Synthetic
ATWDDSPNGPV

SEQ ID NO: 2013 - protein, 127 aa, Artificial Sequence
  Synthetic
QVQLVQSGAEVKKPGSSVTVSCKTSGGTFNDYAISWVRQAPGQGLEWMGGIIPMFGTGNYTQKFQDRVTITADESTSTVYMELRSLRSEDTAVYYCARGPGYCSGGRCHLTNWFDPWGQGTLVTVFS

SEQ ID NO: 2014 - protein, 20 aa, Artificial Sequence
  Synthetic
ARGPGYCSGGRCHLTNWFDP

SEQ ID NO: 2015 - protein, 111 aa, Artificial Sequence
  Synthetic
QSVLTQPPSVSGAPGQRVTISCTGSRSNIGAGYDVHWYQQLPGTAPKLLIYNNNNWPSGVPARFSGSKSGTSASLAITGLQAEDEADYYCQSYDNSLSGSPVFGGGTKLTV

SEQ ID NO: 2016 - protein, 12 aa, Artificial Sequence
  Synthetic
QSYDNSLSGSPV

SEQ ID NO: 2017 - protein, 126 aa, Artificial Sequence
  Synthetic
QVQLVQSGAEVKRPGASVKVSCKASGYIFPNYDIIWVRQATGQGLEWMGWLNPNSGNTGSAQKFQGRVTMTSDSSINTAYMELSSLRSEDTAVYYCARGFDFSSSGFYVYWYFDLWGRGTLVSVSS

SEQ ID NO: 2018 - protein, 19 aa, Artificial Sequence
  Synthetic
ARGFDFSSSGFYVYWYFDL

SEQ ID NO: 2019 - protein, 109 aa, Artificial Sequence
  Synthetic
QSVLTQPASVSGSPGQSIAISCTGTDSDIGNYHLVSWYQHHPGKAPKLIIYDIDKRPSGVSSRFSGSKSGNTASLTISGLQAEDEADYYCCSYAGSSNVIFGGGTKLTV

SEQ ID NO: 2020 - protein, 10 aa, Artificial Sequence
  Synthetic
CSYAGSSNVI

SEQ ID NO: 2021 - protein, 135 aa, Artificial Sequence
  Synthetic
QVQLVQSGAEVKKPGASVKVSCKASGFRFTDYFIHWVRQAPGQGLEWMGWINPNSGGTRYAQKFQGWVSLTRDTSITTAYMELSRLRSGDTAVYYCTRDLPLYYYDGRGHEVEHKDSLYYGMDVWGQGTTVTVYS

SEQ ID NO: 2022 - protein, 28 aa, Artificial Sequence
  Synthetic
TRDLPLYYYDGRGHEVEHKDSLYYGMDV

SEQ ID NO: 2023 - protein, 109 aa, Artificial Sequence
  Synthetic
QSVLTQPASVSGSPGQSITISCTGTSSDIGSYNYVSWYQQHPGKAPKLIISDVTNRPSGVSDRLSASKSGNTASLSISGLRAEDEADYYCSSYTNSSTRVFGGGTKLTV

SEQ ID NO: 2024 - protein, 10 aa, Artificial Sequence
  Synthetic
SSYTNSSTRV

SEQ ID NO: 2025 - protein, 126 aa, Artificial Sequence
  Synthetic
EVQLVQSGAEVKKPGESLKISCKTSGYKFTNYWIGWVRQMPGKGLEWMGIIYPDDSDARYSPSFQGQVTISVDNSLTSAFLQWNSLQASDTAIYYCARQQTPYCSGDCYSDAFDVWGQGTVVTVSS

SEQ ID NO: 2026 - protein, 19 aa, Artificial Sequence
  Synthetic
ARQQTPYCSGDCYSDAFDV

SEQ ID NO: 2027 - protein, 106 aa, Artificial Sequence
  Synthetic
SYVLTQPLSVSVALGQTARITCGGDNIGSKDVHWYHQKPGQAPVVVIFRSTTRPSGIPERFSGSNSGNTATLTISRAQAGDEGDYYCQVWDSNIVVFGGGAKVTVL

SEQ ID NO: 2028 - protein, 9 aa, Artificial Sequence
  Synthetic
QVWDSNIVV

SEQ ID NO: 2029 - protein, 124 aa, Artificial Sequence
  Synthetic
QVQLVQSGAEVKKPGSSVKVSCRASGGPFSNYGLIWVRQAPGQGLEWMGGIIPILGTTRSAQKFQGRVTITADGFTNTVYMELSSLRSDDTAVYFCAREMGYSDSGANWYFDLWGRGTLVTVSS

SEQ ID NO: 2030 - protein, 17 aa, Artificial Sequence
  Synthetic
AREMGYSDSGANWYFDL

SEQ ID NO: 2031 - protein, 111 aa, Artificial Sequence
  Synthetic
QSVLTQPPSVSGAPGQRVTISCTGSSSNIGAGYDVHWYQQLPGTAPKLLIYRNNNRPSGVPDRFSGSKSGTSASLAITGLQADDETFYYCQSYDSSLSGSVFGGGTKLTVL

SEQ ID NO: 2032 - protein, 11 aa, Artificial Sequence
  Synthetic
QSYDSSLSGSV

SEQ ID NO: 2033 - protein, 123 aa, Artificial Sequence; identical to SEQ ID NO: 25
  Synthetic

SEQ ID NO: 2034 - protein, 16 aa, Artificial Sequence
  Synthetic
ARTSSPHSSSTGDFDS

SEQ ID NO: 2035 - protein, 110 aa, Artificial Sequence
  Synthetic
SYVLTQPPSVSVAPGKTARITCGGDDIGSKSVHWYQQKSGQAPVLVIHDDSDRPSGIPERFSGSNSGNTATLTISRVEAGDEADYYCQVWDFTGDHPGWVFGGGTKLTVL

SEQ ID NO: 2036 - protein, 13 aa, Artificial Sequence
  Synthetic
QVWDFTGDHPGWV

SEQ ID NO: 2037 - protein, 119 aa, Artificial Sequence
  Synthetic
QVQLVESGGDLVKPGGSLRLSCAASGFTFSDYYMSWIRQAPGKGLEWVSYISSSGSIIHHADSVKGRLTVSRDNAKNSLYLQMNSLRAEDTAVYYCSGTSYPYGAFDIWGRGTLVTVSS

SEQ ID NO: 2038 - protein, 12 aa, Artificial Sequence
  Synthetic
SGTSYPYGAFDI

SEQ ID NO: 2039 - protein, 110 aa, Artificial Sequence
  Synthetic
NFMLTQPHSVSESPGKTVTISCTGSSGSIASNYVHWYRQRPGSAPTTVIYEDNQRPSGVPDRFSGSIDSSSNSASLTISGLKTEDEADYYCQSYDSNTWVFGGGTKLTVL

SEQ ID NO: 2040 - protein, 9 aa, Artificial Sequence
  Synthetic
QSYDSNTWV

SEQ ID NO: 2041 - protein, 127 aa, Artificial Sequence
  Synthetic
QLQLQESGPGLVKPSETLSLTCTVSGGSISSSSYYWEWIRQPPGKGLEWIGKIFYSGSTSYNPSLKSRVTMSVDTSKNQFSLRLTSVSAADTATYYCARLPRGYYSDSSPYHAFDVWGQGTMVTVSS

SEQ ID NO: 2042 - protein, 19 aa, Artificial Sequence
  Synthetic
ARLPRGYYSDSSPYHAFDV

SEQ ID NO: 2043 - protein, 108 aa, Artificial Sequence
  Synthetic
QSVLTQPASVSGSPGQSITISCTGSSSDIGSYDLVSWYQQHPGQAPKLIISEVTKRPSGVSNRFSGSKSGSTASLTISGLQAEDEADYYCCTYAGISIFGGGTKLTVL

SEQ ID NO: 2044 - skipped

SEQ ID NO: 2045 - protein, 122 aa, Artificial Sequence
  Synthetic
QVQLVQSGAEVKKSGASVKVSCKASGYIFPNYGINWVRQAPGQGLEWMGWISVLSGNTKFAQKFQGRVSMTTDTSTNTAHMELTGLRSDDTAVYYCARFPTAFFDATNMEVWGTGTTVTVSP

SEQ ID NO: 2046 - protein, 15 aa, Artificial Sequence
  Synthetic
ARFPTAFFDATNMEV

SEQ ID NO: 2047 - protein, 110 aa, Artificial Sequence
  Synthetic
QSVLTQPPSASGSPGQSVTISCTGTSSDVDTYKYVSWYQQHPGKAPKLLIYEVTKRPSGVPDRFSGSKSGNTASLTVSGLQAEDEADYFCNSYAGSNSVAFGGGTKLTVL

SEQ ID NO: 2048 - protein, 10 aa, Artificial Sequence
  Synthetic
NSYAGSNSVA

SEQ ID NO: 2049 - protein, 121 aa, Artificial Sequence; identical to SEQ ID NO: 31
  Synthetic

SEQ ID NO: 2050 - protein, 14 aa, Artificial Sequence
  Synthetic
ARGGQDELTGTFDV

SEQ ID NO: 2051 - protein, 105 aa, Artificial Sequence
  Synthetic
SYVLTQPPSVSLAPGKTASITCGGDSIGSKSVHWYQQRPGQAPILVIYYDGDRPSGIPERFSGSNSGNTATLTISRVEAGDEADYYCQVWDGGWVFGGGTKLTVL

SEQ ID NO: 2052 - protein, 8 aa, Artificial Sequence
  Synthetic
QVWDGGWV

SEQ ID NO: 2053 - protein, 121 aa, Artificial Sequence
  Synthetic
EVQLVESGGGLVQPGGSLRLSCSASGFSFSDFGMNWVRQAPGKGLEWISSIRSDSSSRYHADSVKGRFTISRDNAKKSLYLQMNSLRVEDTAVYYCARDPPHDPSDYFDYWGRGILVTVSS

SEQ ID NO: 2054 - protein, 14 aa, Artificial Sequence
  Synthetic
ARDPPHDPSDYFDY

SEQ ID NO: 2055 - protein, 105 aa, Artificial Sequence
  Synthetic
SYVLTQPPSVSVAPGKTASITCGGDSIGSKSVHWYQQKPGQAPILVIYYDSDRPSGIPERFSGSNSGGTATLSISRVEAGDEADYYCQVWDSGKIFGGGTKLTVL

SEQ ID NO: 2056 - protein, 8 aa, Artificial Sequence
  Synthetic
QVWDSGKI

SEQ ID NO: 2057 - protein, 128 aa, Artificial Sequence
  Synthetic
QVQLQESGPGLVKPSQTLSLTCTVSGGSISSGNYYWSWIRQHPGKGLEWIGHIYYRGSTYYNPSLKSRVTISVDTSKNQFSLKLSSVTAADTAVYYCARDAGFYYDSSGYYSNAFDIWGQGTMVTVSS

SEQ ID NO: 2058 - protein, 20 aa, Artificial Sequence
  Synthetic
ARDAGFYYDSSGYYSNAFDI

SEQ ID NO: 2059 - protein, 108 aa, Artificial Sequence
  Synthetic
QSVLTQPASVSGSPGQSITISCTGTSSDVGSYDLVSWYQQHPGKAPKLIIYEVSKRPSGVSNRFSGSKSGNTASLTISGLQAEDEAHYHCCSFAGSRLFGGGTKLTVL

SEQ ID NO: 2060 - protein, 8 aa, Artificial Sequence
  Synthetic
CSFAGSRL

SEQ ID NO: 2061 - protein, 121 aa, Artificial Sequence; identical to SEQ ID NO: 23
  Synthetic

SEQ ID NO: 2062 - protein, 13 aa, Artificial Sequence
  Synthetic
ARVVRLWPRYFDS

SEQ ID NO: 2063 - protein, 110 aa, Artificial Sequence
  Synthetic
QSVLTQPPSASGSPGQSVTISCTGTSSDVGTYDYVSWYQQHPGKAPKVIIYEVTKRPSGVPDRFSGSKSGNTASLTVSGLQAEDEAHYYCSTYAGSDNLEFGGGTKLTVL

SEQ ID NO: 2064 - protein, 10 aa, Artificial Sequence
  Synthetic
STYAGSDNLE

SEQ ID NO: 2065 - protein, 121 aa, Artificial Sequence
  Synthetic
QVQLVESGGGVVQPGRSLRLSCAASGFTFSTYSMHWVRQAPGKGLEWAAIISYDGTKKHYADSVKGRFTISRDNSKNTLFLQLDNLRNEDTAVYYCAKDGLETTMGDYFDTWGQGSLVTVS

SEQ ID NO: 2066 - protein, 15 aa, Artificial Sequence
  Synthetic
AKDGLETTMGDYFDT

SEQ ID NO: 2067 - protein, 108 aa, Artificial Sequence
  Synthetic
SYVLTQPPSVSVAPGKTARITCGGDNIGSKNVYWYQQRPGLAPVLVIFYDIDRPSGIPERFSGSNSGNTATLTISRVEAGDEADYYCQVWDTSSDHWVFGGGTKLTVL

SEQ ID NO: 2068 - protein, 11 aa, Artificial Sequence
  Synthetic
QVWDTSSDHWV

SEQ ID NO: 2069 - protein, 122 aa, Artificial Sequence
  Synthetic
EVQLVESGGGLVKPGGSLRLSCAASGFSFTNAWMSWIRQAPGKGLEWVGRIKSKTDGGTADYAAPVKGRFSFSRDDSKNTLDLQMNSLKTEDTAVYYCTTVIVELGYYFDHWGHGTLVTVSS

SEQ ID NO: 2070 - protein, 13 aa, Artificial Sequence
  Synthetic
TTVIVELGYYFDH

SEQ ID NO: 2071 - protein, 110 aa, Artificial Sequence
  Synthetic
QSVLTQPPSASGTPGQRVTISCSGSNSNIGTNYVYWYQQLPGTAPKLLIYRNNLRASEVPDRFSGSKSGTSASLAISGLRSEDEADYYCAAWDDTLSGVAFGGGTKLTVL

SEQ ID NO: 2072 - protein, 11 aa, Artificial Sequence
  Synthetic
AAWDDTLSGVA

SEQ ID NO: 2073 - protein, 121 aa, Artificial Sequence
  Synthetic
QVQLQESGPGLVKSSETLSLTCTVSSGSVRSGGYYWSWIRHHPGKGLEWIGYIFYTGITYYNPSLKSRVIVSVDPSKNQFSLNLTSVTAADTAVYYCASTPYTNGGAFHIWGQGTMVTVSP

SEQ ID NO: 2074 - protein, 13 aa, Artificial Sequence
  Synthetic
ASTPYTNGGAFHI

SEQ ID NO: 2075 - protein, 110 aa, Artificial Sequence
  Synthetic
QSVLTQPPSASGSPGQSVTISCTGTSSDVGGHNYVSWYQQFPGKAPKLIIYDVNKRPSGVPDRFSGSKSANTASLTVSGLQAEDEADYHCSSYAGSNNWVFGGGTKLTVL

SEQ ID NO: 2076 - protein, 10 aa, Artificial Sequence
  Synthetic
SSYAGSNNWV

SEQ ID NO: 2077 - protein, 123 aa, Artificial Sequence
  Synthetic
QLQLQESGPGLVKPSETLSLTCIVSGGSINSTTYYWDWIRQSPGKGLEWIGSIFYTGITYYSPSLKTRVTISVDTSKNQFSLRLNSMTAADTAVYYCARRLRQLWFGPWFDPWGQGTLVTVSS

SEQ ID NO: 2078 - protein, 15 aa, Artificial Sequence
  Synthetic
ARRLRQLWFGPWFDP

SEQ ID NO: 2079 - protein, 110 aa, Artificial Sequence
  Synthetic
QSVLTQPPSASGSPGQSVTISCTGTRSDVGDYNYVSWYQQHPDKAPKLIIFEVTKRPSGVPDRFSGSKSGNTASLTVSGLQAEDEADYYCSSYAGSSNVMFGGGTKLTVL

SEQ ID NO: 2080 - protein, 10 aa, Artificial Sequence
  Synthetic
SSYAGSSNVM

SEQ ID NO: 2081 - protein, 124 aa, Artificial Sequence
  Synthetic
QVQLVQSGAEVKKPGASVKVSCKASGYTFTYYYMHWVRQAPGQGLEWMGIINPSGGSTSYAQKFQGRVTMTRDTSTSTVYMELSSLRSEDTAVYYCARPLLPGETGSLNRLDYWGQGTLVTVSS

SEQ ID NO: 2082 - protein, 17 aa, Artificial Sequence
  Synthetic
ARPLLPGETGSLNRLDY

SEQ ID NO: 2083 - protein, 110 aa, Artificial Sequence
  Synthetic
QSVLTQPPSVSEAPRQRVTISCSGSSANIENNGVNWYQQLPGKAPKLLIYNDDLLFSGVSDRFSGSKSGTSASLAISGLQSEDEADYYCATWDDSLNGPVFGGGTKLTVL

SEQ ID NO: 2084 - protein, 11 aa, Artificial Sequence
  Synthetic
ATWDDSLNGPV

SEQ ID NO: 2085 - protein, 119 aa, Artificial Sequence
  Synthetic
EVQLVESGGGLVQPGGSLRLSCAASGFTFSSYWMIWVRQAPGKGLEWVANIKLDGSEKKYVDSVKGRFTISRDNAKNSLYLQMNSLRAEDTAVYYCARASYYYGWFDPWGQGTLVTVSS

SEQ ID NO: 2086 - protein, 12 aa, Artificial Sequence
  Synthetic
ARASYYYGWFDP

SEQ ID NO: 2087 - protein, 111 aa, Artificial Sequence
  Synthetic
NFMLTQPHSVSESPGKTVTISCTGSSGSIASNYVQWYQQRPGSAPTNVIYEDNQRPSGVPDRFSGSIDSSSNSASLTISGLKTEDEADYYCQSYDGTNLWVFGGGTKLTVL

SEQ ID NO: 2088 - protein, 10 aa, Artificial Sequence
  Synthetic
QSYDGTNLWV

SEQ ID NO: 2089 - protein, 127 aa, Artificial Sequence
  Synthetic
EVQLLESGGGLLQPGGSLRLSCAASGFTFSSYVMSWVRQAPGKGLEWVSSISGSGGGTYYADSVKGRFTISRDNSKNTLFLQMNSLRAEDTAVYYCAKHPVMAALGDVYYYYGMDVWGQGTTVTVSS

SEQ ID NO: 2090 - protein, 20 aa, Artificial Sequence
  Synthetic
AKHPVMAALGDVYYYYGMDV

SEQ ID NO: 2091 - protein, 111 aa, Artificial Sequence
  Synthetic
QSVLTQPPSVSGAPGQRVTISCTGSSSNFGAGYDVHWYQLLPGTAPKLLMYGNSDRPSGVPDRFSGSKSGTSASLAITGLQAEDEADYYCQSYDSSLSGWVFGGGTKLTVL

SEQ ID NO: 2092 - protein, 11 aa, Artificial Sequence
  Synthetic
QSYDSSLSGWV

SEQ ID NO: 2093 - protein, 125 aa, Artificial Sequence
  Synthetic
QVQLVESGGGVVQPGRSLRLSCAASGFTFSNYDMHWVRQAPGKGLEWVAFISYDGGNKHSADSVKGRFSISRDNSKNTLYLQMNSLRPEDTAVYYCAHHQGGGTGVYYSDPFDSWGQGTLVTVSS

SEQ ID NO: 2094 - protein, 18 aa, Artificial Sequence
  Synthetic
AHHQGGGTGVYYSDPFDS

SEQ ID NO: 2095 - protein, 105 aa, Artificial Sequence
  Synthetic
SYVLTQPPSVSVAPGKTATITCGGDSVGSKSVHWYQQKSGQAPVLVISYDNDRPSGIPDRFSGSNSGNTATLTISRVEAGDEADYHCQVWDISPVFGGGTKLTVL

SEQ ID NO: 2096 - protein, 8 aa, Artificial Sequence
  Synthetic
QVWDISPV

SEQ ID NO: 2097 - protein, 125 aa, Artificial Sequence; identical to SEQ ID NO: 69
  Synthetic

SEQ ID NO: 2098 - protein, 18 aa, Artificial Sequence
  Synthetic
ARRGDGNVPLFHYYYMDV

SEQ ID NO: 2099 - protein, 110 aa, Artificial Sequence; identical to SEQ ID NO: 70
  Synthetic

SEQ ID NO: 2100 - protein, 11 aa, Artificial Sequence
  Synthetic
AAWDDSANGPI

SEQ ID NO: 2101 - protein, 129 aa, Artificial Sequence
  Synthetic
QVQLVQSGAEVKKPGTSVKVSCKASGYTFTDYFMHWVRQAPGQGLEWMGWINPNSGGTNYAQNFQGRVTMTSDTSITTAYMELSRLRSDDTAVYYCAIKPPIYYYDSSGSFLSYYYMDVWGKGTTVTVS

SEQ ID NO: 2102 - protein, 23 aa, Artificial Sequence
  Synthetic
AIKPPIYYYDSSGSFLSYYYMDV

SEQ ID NO: 2103 - protein, 111 aa, Artificial Sequence
  Synthetic
QSVLTQPPSVSAAPGQKVSISCSGSSSNIGNHYVSWYQQFPGTAPKLLIYDNNKRPSGIPDRFSGSKSGTSATLGIAGLQTGDEADYYCGTWDSSLSADWVFGGGTKLTVL

SEQ ID NO: 2104 - protein, 12 aa, Artificial Sequence
  Synthetic
GTWDSSLSADWV

SEQ ID NO: 2105 - protein, 124 aa, Artificial Sequence
  Synthetic
EVQLVESGGGLVQPGRSLRLSCAASGFTFDDYAMHWVRQAPGKGLEWVSGISWNSGSMGYAESLKGRFTISRDNAKNSLYLQMNSLRAEDTALYYCAKPKKRGDYYGSGSFDYWGQGTLVTVSS

SEQ ID NO: 2106 - protein, 17 aa, Artificial Sequence
  Synthetic
AKPKKRGDYYGSGSFDY

SEQ ID NO: 2107 - protein, 110 aa, Artificial Sequence
  Synthetic
QSVLTQPASVSGSPGQSITISCTGTNSDIGAYNFVSWYQQHPGKAPKLMIYDVNNRPSGVSSRFSGSKSGNTASLTISGLQAEDEADYYCTSYRMTSTVVFGGGTKLTVL

SEQ ID NO: 2108 - protein, 10 aa, Artificial Sequence
  Synthetic
TSYRMTSTVV

SEQ ID NO: 2109 - protein, 122 aa, Artificial Sequence
  Synthetic
QVQLVQSGAEVKKPGASVKVSCKTSGYLFTGYYIHWVRQAPGHGLEWMGWVNPNSGATNNTQKFQGRITMTRDTSITTVHMELSRLKSDDTAVYYCARDFDFSVVSNAFDIWGQGTMVTVSS

SEQ ID NO: 2110 - protein, 15 aa, Artificial Sequence
  Synthetic
ARDFDFSVVSNAFDI

SEQ ID NO: 2111 - protein, 110 aa, Artificial Sequence
  Synthetic
QSVLTQPPSASGSPGQSVTISCTGTSSDVGGYNYVSWYQQHPDKAPKLMIYEVSKRPSGVPDRFSGSKSGNTASLTVSGLQAEDEADYYCNSYAGNNILVFGGGTKLTVL

SEQ ID NO: 2112 - protein, 10 aa, Artificial Sequence
  Synthetic
NSYAGNNILV

SEQ ID NO: 2113 - protein, 126 aa, Artificial Sequence
  Synthetic
QVQLVQSGAEVKKPGASVKVSCKASGYTFTDHYMHWVRQAPGQGLEWMGWINPNTGGTNFAQKFQGRVTMTRDTSISTAYMELNRLRSDDTAVYYCARVGRLAPRPYYFYYYMDVWGKGTTVTVSS

SEQ ID NO: 2114 - protein, 19 aa, Artificial Sequence
  Synthetic
ARVGRLAPRPYYFYYYMDV

SEQ ID NO: 2115 - protein, 110 aa, Artificial Sequence
  Synthetic
QSVLTQPASVSGSPGQSITISCTGTSSDVGDYNYVSWYQQYPGKAPKLMIYDVSNRPSGVSDRFSGSKSGNTASLTISGLQAEDEADYYCSSYTSTTTLVFGTGTKVTVL

SEQ ID NO: 2116 - protein, 10 aa, Artificial Sequence
  Synthetic
SSYTSTTTLV

SEQ ID NO: 2117 - protein, 128 aa, Artificial Sequence
  Synthetic
EVQLVESGGGLVQPGGSLRLSCAASGFTFSTYSMNWVRQAPGKGLEWVSYISSSSSTIHYADSVKGRFTISRDNAKNSLYLQMNSLRDEDTAVYYCAREAHDGALTDYGDYLNWFDPWGQGTLVTVSS

SEQ ID NO: 2118 - protein, 21 aa, Artificial Sequence
  Synthetic
AREAHDGALTDYGDYLNWFDP

SEQ ID NO: 2119 - protein, 110 aa, Artificial Sequence
  Synthetic
SYVLTQPPSVSVAPGKTARITCGGTNIGSKNVHWYQQKPGQAPVLVIYYDNDRPSGIPERFSGSNSGNTATLTISRVEAGDEADYYCQVWDTTSDHFYWVFGGGTKLTVL

SEQ ID NO: 2120 - protein, 13 aa, Artificial Sequence
  Synthetic
QVWDTTSDHFYWV

SEQ ID NO: 2121 - protein, 122 aa, Artificial Sequence
  Synthetic
QVQLVQSGAEVKKPGASVKVSCKASGYLFTGHYIHWVRQAPGQGLEWMAWINPNSGATNYTQKFQGRVTMTRDTSITTTFMELSRLRSDDTAVYYCARDLGWSRVQGSLDIWGQGTIVTVSS

SEQ ID NO: 2122 - protein, 15 aa, Artificial Sequence
  Synthetic
ARDLGWSRVQGSLDI

SEQ ID NO: 2123 - protein, 110 aa, Artificial Sequence
  Synthetic
QSVLTQPPSASGSPGQSVTISCTGTSSDVGGYDFVSWYQQHPGKAPKLIIYEVNQRPSGVPDRFSGSKSGDSASLTVSGLQTEDEADYYCNSYAGNNNWVFGGGTKLTVL

SEQ ID NO: 2124 - protein, 10 aa, Artificial Sequence
  Synthetic
NSYAGNNNWV

SEQ ID NO: 2125 - protein, 123 aa, Artificial Sequence
  Synthetic
QLQLQESGPGLVKPSETLSLTCTVSGGSISSTTYYWDWIRQSPGKGLEWIGSIFYTGITYYSPSLKSRVTISVDTSKNQFSLRLNSMTAADTAVYYCARRLRQLWFGPWFDPWGQGTLVTVSS

SEQ ID NO: 2126 - protein, 15 aa, Artificial Sequence
  Synthetic
ARRLRQLWFGPWFDP

SEQ ID NO: 2127 - protein, 110 aa, Artificial Sequence
  Synthetic
QSVLTQPPSASGSPGQSVTISCTGTRSDVGDYNYVSWYQQHPDKAPKLIIYEVTKRPSGVPDRFSGSKSGNTASLTVSGLQAEDEADYYCSSYAGSNNVMFGGGTKLTVL

SEQ ID NO: 2128 - protein, 10 aa, Artificial Sequence
  Synthetic
SSYAGSNNVM

SEQ ID NO: 2129 - protein, 122 aa, Artificial Sequence; identical to SEQ ID NO: 45
  Synthetic

SEQ ID NO: 2130 - protein, 16 aa, Artificial Sequence
  Synthetic
ARTSSPHSSSTGDLDY

SEQ ID NO: 2131 - protein, 110 aa, Artificial Sequence
  Synthetic
SYVLTQSPSVSVAPGKTARITCGGRDIGSKSVHWYQQRPGQAPVLVISYDNDRPSGIPERFSGSNSGNTATLTISRVEAGDEADYYCQVWDGTGDHPGWVFGGGTRLTVL

SEQ ID NO: 2132 - protein, 13 aa, Artificial Sequence
  Synthetic
QVWDGTGDHPGWV

SEQ ID NO: 2133 - protein, 122 aa, Artificial Sequence
  Synthetic
QVQLVQSGAEVRKPGASVKVSCMASGYTFNTYDINWVRQGTGQGLEWMGWMNPNSGNTGHAQKFQGRVAMTVNTSMNTAYMELSSLRSEDTAVYYCARGADMLNVAVGADFDYWGQGTLVTV

SEQ ID NO: 2134 - protein, 17 aa, Artificial Sequence
  Synthetic
ARGADMLNVAVGADFDY

SEQ ID NO: 2135 - protein, 110 aa, Artificial Sequence
  Synthetic
QSVLTQPPSASGSPGQSVTISCTGTSSDVGGYNFVSWFQQHPGKAPKLMIYEVSKRPSGVPDRFSGSKSANTASLTVSGLQAEDEADYFCSSYAGSNNWVFGGGTKLTVL

SEQ ID NO: 2136 - protein, 10 aa, Artificial Sequence
  Synthetic
SSYAGSNNWV

SEQ ID NO: 2137 - protein, 117 aa, Artificial Sequence
  Synthetic
EVQLVESGGGLVQPGGSLRLSCAASGFTFSSYWMHWVRQAPGKGLVWVSRINSYGSITNYADSVKGRFTISRDNAKNTLYLQMNSLRAEDTAVYYCARELFRTIDPWGQGTLVTVSS

SEQ ID NO: 2138 - protein, 10 aa, Artificial Sequence
  Synthetic
ARELFRTIDP

SEQ ID NO: 2139 - protein, 110 aa, Artificial Sequence
  Synthetic
NFMLTQPHSVSESPGKTVTISCTGSSGSIASNYVQWYQQRPGSAPTTVIYEDNQRPSGVPDRFSGSIDSSSNSASLTISGLKTEDEADYYCQSFDSSSVVFGGGTKLTVL

SEQ ID NO: 2140 - protein, 9 aa, Artificial Sequence
  Synthetic
QSFDSSSVV

SEQ ID NO: 2141 - protein, 120 aa, Artificial Sequence
  Synthetic
QVQLVQSGTELVKPGASVNLSCKASGYTFTSYWMHWVKQRPGQGLEWIGNINPSNGGTNYNEKFKNKATLTVDKSSSTAYMQLSSLTSEDSAVYYCARPPYYSNFLFVYWGQGTTVTVSS

SEQ ID NO: 2142 - protein, 13 aa, Artificial Sequence
  Synthetic
ARPPYYSNFLFVY

SEQ ID NO: 2143 - protein, 109 aa, Artificial Sequence
  Synthetic
QSVLTQEPSLTVSPGGTVTLTCASSTGAVTSDSYPNWFQQKPGQPPRALIYSTSNKHSWTPARFSGSLLGGKAALTLSGVQPEDEADYYCLLYDGDAVLFGGGTKLTVL

SEQ ID NO: 2144 - protein, 9 aa, Artificial Sequence
  Synthetic
LLYDGDAVL

SEQ ID NO: 2145 - protein, 122 aa, Artificial Sequence
  Synthetic
QVQLQESGPGLVKPSQTLSLTCSVSGASISNADYYWSWIRQPPGKGLEWIGYIYYSGTSYYNPSLKSRVTISVDTSKNQFSLKLSSVTAADTAVYYCARELRWSLGGGASYWGQGTLVTVSS

SEQ ID NO: 2146 - protein, 14 aa, Artificial Sequence
  Synthetic
ARELRWSLGGGASY

SEQ ID NO: 2147 - protein, 110 aa, Artificial Sequence
  Synthetic
QSVLTQPASESGSPGQSITISCTGTSSDVGSYNLVSWYQQHPGKAPKLMIYEGIKRPSGVSNRFSGSKSGNTASLTISGLQAEDEADYYCCSYAGSTNVIFGGGTKLTVL

SEQ ID NO: 2148 - protein, 10 aa, Artificial Sequence
  Synthetic
CSYAGSTNVI

SEQ ID NO: 2149 - protein, 121 aa, Artificial Sequence
  Synthetic
QVQLVESGGGVVQPGGSLRLSCAASGFTFSNHGMHWVRQAPGKGLEWVAVMSYDGSNEDYSASVKGRFTISRDNSKNTLSLQMNSLRPEDTAVYYCASEDYYDSSGSFDNWGQGTLVTVSS

SEQ ID NO: 2150 - protein, 14 aa, Artificial Sequence
  Synthetic
ASEDYYDSSGSFDN

SEQ ID NO: 2151 - protein, 110 aa, Artificial Sequence
  Synthetic
QYVLTQPRSVSGSPGQSVTISCTGTSSDVGGSNYVSWYQQHPGKAPKVMVYDVRKRPSGVPDRFSGSKSGNTASLTISGLQPEDEADYYCCSYAGTYTWVFGGGTTLTVL

SEQ ID NO: 2152 - protein, 10 aa, Artificial Sequence
  Synthetic
CSYAGTYTWV

SEQ ID NO: 2153 - protein, 123 aa, Artificial Sequence
  Synthetic
QVQLVQSGAEVKKPGASVMVSCRTSGYRITDYYIHWVRQAPGQGLEWMGWINPISGGTNYAQKFQGRVTMTRDTSILTAYMELTRLRSDDTAVYYCARGTFYYDSSGYYIDYWGQGTLVTVSS

SEQ ID NO: 2154 - protein, 16 aa, Artificial Sequence
  Synthetic
ARGTFYYDSSGYYIDY

SEQ ID NO: 2155 - protein, 111 aa, Artificial Sequence
  Synthetic
QSVLTQPPSASGSPGQSVTISCTGTSSDVGGYNYVSWYQQHPGKAPKLLIYEVSKRPSGVPDRFSASKSGNTASLTVSGLQAEDEADYYCNSYAGSNNPVVFGGGTKLTVL

SEQ ID NO: 2156 - protein, 11 aa, Artificial Sequence
  Synthetic
NSYAGSNNPVV

SEQ ID NO: 2157 - protein, 126 aa, Artificial Sequence
  Synthetic
QVQLVESGGGVVQPGRSLRLSCVGSGFTFSNYAVHWVRQAPGKGLEWVTVISSDGGDKDYADAVKGRFTISRDNSKYKVYLEMKSLRGEDTAVYYCAREGSSGSYYTGFYSYMDVWGKGTTVTVSS

SEQ ID NO: 2158 - protein, 19 aa, Artificial Sequence
  Synthetic
AREGSSGSYYTGFYSYMDV

SEQ ID NO: 2159 - protein, 113 aa, Artificial Sequence
  Synthetic
QSVLTQPASVSGSPGQSITISCTGTSSDVGNYNYVSWYQQHPGKAPKVMIYDVDTRPSGVSDRFSGSKSGNTASLTISGLQPEDEADYYCSSYTSNSALANWVFGGGTKLTVL

SEQ ID NO: 2160 - protein, 13 aa, Artificial Sequence
  Synthetic
SSYTSNSALANWV

SEQ ID NO: 2161 - protein, 126 aa, Artificial Sequence
  Synthetic
EVQLLESGGDLVHPGGSLRLSCAASGFTFRSYAMSWVRQAPGKGLEWVSSVSGAGGSTYYADSVKGRFTISRDNSKNTLFMHMNSLRAEDTAVYYCVRTRMDYYDSIGYPWAFEIWGQGTMVTVSS

SEQ ID NO: 2162 - protein, 19 aa, Artificial Sequence
  Synthetic
VRTRMDYYDSIGYPWAFEI

SEQ ID NO: 2163 - protein, 108 aa, Artificial Sequence
  Synthetic
QSVLTQPASESGSPGQSITISCTGTNSDVGSYDLVSWYQQHPGKAPKLIIYEVNKRPSGVSSRFSGSKSGNTASLTISGLQIEDEADYYCCSYAGTWLFGGGTRLTVL

SEQ ID NO: 2164 - protein, 8 aa, Artificial Sequence
  Synthetic
CSYAGTWL

SEQ ID NO: 2165 - protein, 123 aa, Artificial Sequence
  Synthetic
QVQLVQSGAEVKKPGASVKVSCKASGYTFSHYDINWVRQATGQGLEWMGWMNPNSGNTGYAQKFQGRVTLTKNTSISTVYMELRSLTSEDTAVYYCARGLSILAVSEDWFDPWGPGTLVTVSS

SEQ ID NO: 2166 - protein, 16 aa, Artificial Sequence
  Synthetic
ARGLSILAVSEDWFDP

SEQ ID NO: 2167 - protein, 107 aa, Artificial Sequence
  Synthetic
SYVLTQPPSVSVAPGKTARITCGGNNIGGKRIYWYQQKPGQAPVLVIYYNNDRPSGIPERFSGSNSGNTATLTISRVEAGDEADYYCQVWDNSIDHYIFGTGTKVTV

SEQ ID NO: 2168 - protein, 11 aa, Artificial Sequence
  Synthetic
QVWDNSIDHYI

SEQ ID NO: 2169 - protein, 130 aa, Artificial Sequence
  Synthetic
QVQLVQSGAEVKKPGASVTVSCKASGYIFTDYYMHWVRQAPGQGLEWMGWINPNSGGANYAQKFQGRISMTTDTSVTTGYMDLSRLRSDDTAVYYCAIKPPTYHFDNNGYHLPYDYVDVWGTGTTVTVAS

SEQ ID NO: 2170 - protein, 23 aa, Artificial Sequence
  Synthetic
AIKPPTYHFDNNGYHLPYDYVDV

SEQ ID NO: 2171 - protein, 111 aa, Artificial Sequence
  Synthetic
QSVLTQPPSVSAAPGQKVTISCSGSSSNIGNYYVSWYQQLPGTAPKLLIYDNNKRPSGIPDRFSGSKSGTSATLGITGLQTGDEADYYCGTWDNSLSTDWVFGGGTKLTVL

SEQ ID NO: 2172 - protein, 12 aa, Artificial Sequence
  Synthetic
GTWDNSLSTDWV

SEQ ID NO: 2173 - protein, 123 aa, Artificial Sequence
  Synthetic
QVQLVQSGAEVKKPGSSVKVSCKASGGTFNSYALSWVRQAPGQGLEWMGGIIFIFDKPDYAQKFKGRLTITADESTNTVYMELSSLRSEDTAVYYCAREGGHTHPYYHGMDVWGQGTTVTVYS

SEQ ID NO: 2174 - protein, 16 aa, Artificial Sequence
  Synthetic
AREGGHTHPYYHGMDV

SEQ ID NO: 2175 - protein, 109 aa, Artificial Sequence
  Synthetic
QSVLTQPPSASGSPGQSVTISCTGTSSDVGGYNYVSWYQQHPGKAPKLMIYEVTKRPSGVPDRFSGSKSGNTASLTVSGLRPEDEADYYCTSYAGSITYVFGTGTKVSV

SEQ ID NO: 2176 - protein, 10 aa, Artificial Sequence
  Synthetic
TSYAGSITYV

SEQ ID NO: 2177 - protein, 120 aa, Artificial Sequence
  Synthetic
QVQLVQSGAEVGKPGSSVKVSCKAPSGTFNIYSISWLRQSPGQGLEWVGAITPLFSSSNYAHKFQHRVTITADEATNTAYMELSSLTSEDTALYYCATGGESETTWFDPWGQGTLVTVSS

SEQ ID NO: 2178 - protein, 13 aa, Artificial Sequence
  Synthetic
ATGGESETTWFDP

SEQ ID NO: 2179 - protein, 109 aa, Artificial Sequence
  Synthetic
SYVLTQKPSVSVAPERAACLTCGGDNVASKDVQWCQLRPGQAPVVVIYSDSDRPPETPDRFSGSNSGNTASLTTSRVEAGDEADYYCQLCHSASGHPWVFGGGTNLTVL

SEQ ID NO: 2180 - protein, 12 aa, Artificial Sequence
  Synthetic
QLCHSASGHPWV

SEQ ID NO: 2181 - protein, 123 aa, Artificial Sequence
  Synthetic
EVQLLESGGGLVQPGGSLRLSCAGSGFTFSHYALSWVRQAPGKGLEWVSCISGTGGNSHYADSVKGRFTSSRDNSKNILYLQMNSLRAEDTAVYFCAKGGDFWSGYLIPFDSWGQGTLVTVSS

SEQ ID NO: 2182 - protein, 16 aa, Artificial Sequence
  Synthetic
AKGGDFWSGYLIPFDS

SEQ ID NO: 2183 - protein, 108 aa, Artificial Sequence
  Synthetic
SYVLTQSPSVSVAPGKTARITCGGDSIGSKNVHWYQQKPGQAPVLVMYYDNDRPSGIPERFSGYNSGNTATLSISRVEAGDEADYYCLVWDGSGDPWVFGGGTKLTVL

SEQ ID NO: 2184 - protein, 11 aa, Artificial Sequence
  Synthetic
LVWDGSGDPWV

SEQ ID NO: 2185 - protein, 121 aa, Artificial Sequence
  Synthetic
QVQLQESGPGLVKPSQTLSLTCTVSGGSISSGDYYWSWVRQPPGKGLEWIGYIYYTGITYYRPSLKSRVTISVDTSKNQFSLKLSSVTAADTAVFYCARVVRLWPRYFDSWGQGTLVTVSS

SEQ ID NO: 2186 - protein, 13 aa, Artificial Sequence
  Synthetic
ARVVRLWPRYFDS

SEQ ID NO: 2187 - protein, 110 aa, Artificial Sequence
  Synthetic
QSVLTQPPSASGSPGQSVTISCTGTSSDVGTYDYVSWYQQHPGKAPKVIIYEVSRRPSGVPDRFSGSKSGNTASLTVSGLQAEDEAHYYCSTYAGSDNLEFGGGTKLTVL

SEQ ID NO: 2188 - protein, 10 aa, Artificial Sequence
  Synthetic
STYAGSDNLE

SEQ ID NO: 2189 - protein, 130 aa, Artificial Sequence
  Synthetic
QVQLVQSGVEVKKPGASVKVSCKSSGYTFTSYGINWVRQAPGQGLEWMGWINGYNGNTNYAQKFQGRVTMTSDTSTSTAYMQLSSLRSDDTAVYFCARGVISMVRGVPSLPQYNYGMDVWGQGTTVTVSS

SEQ ID NO: 2190 - protein, 23 aa, Artificial Sequence
  Synthetic
ARGVISMVRGVPSLPQYNYGMDV

SEQ ID NO: 2191 - protein, 106 aa, Artificial Sequence
  Synthetic
SYVLTQPPSVSVSPGQTASITCSGDDLGDKYACWYQQKPGQSPVLVIYHDFKRPSGIPERFSGSKSGNTATLTVSGTQAMDEADYYCQAWDSSTGVFGTGTKVTVL

SEQ ID NO: 2192 - protein, 9 aa, Artificial Sequence
  Synthetic
QAWDSSTGV

SEQ ID NO: 2193 - protein, 128 aa, Artificial Sequence; identical to SEQ ID NO: 1193
  Synthetic

SEQ ID NO: 2194 - protein, 21 aa, Artificial Sequence
  Synthetic
AKDTPGGDDILTGWGLYGMDV

SEQ ID NO: 2195 - protein, 110 aa, Artificial Sequence
  Synthetic
QSVLTQPASVSGSPGQSITISCTGTSSDVGSYNLVSWYQQYPGKAPKLMIYEVSKRPSGVSNRFSGSKSGNTASLTISGLRAEDEADYYCCSYVGSSTRVFGGGTKLTVL

SEQ ID NO: 2196 - protein, 10 aa, Artificial Sequence
  Synthetic
CSYVGSSTRV

SEQ ID NO: 2197 - protein, 119 aa, Artificial Sequence
  Synthetic
QVQLVESGGGLVKPGGSLRLSCAASGFTFSDYYMSWIRQAPGKGLECVSYISTSGSAKNCADSVMGRFTISRDNAKNSLFLQMNSLRAEDTAVYYCAGQKWLRAPFDYWGQGILVTVSS

SEQ ID NO: 2198 - protein, 12 aa, Artificial Sequence
  Synthetic
AGQKWLRAPFDY

SEQ ID NO: 2199 - protein, 111 aa, Artificial Sequence
  Synthetic
NFMLTQPHSVSESPGKTVTISCTGSGGSIASNYVQWYQQRPGSAPRNVIYEDSQRPSGVPDRFSGSIDSSSNSASLTISGLKTEDEADYYCQSYDNIYHYVFGTGTQVTVL

SEQ ID NO: 2200 - protein, 10 aa, Artificial Sequence
  Synthetic
QSYDNIYHYV

SEQ ID NO: 2201 - protein, 114 aa, Artificial Sequence
  Synthetic
QVQLVESGGGVVQPGRSLRLSCVASGITFRTYAMHWVRQAPGKGLEWVAVISYDGSNRHYADSVKGRFTISRDNSKNTLSLQMNSLRTEDTAVYYCATTLPNYWGRGTLVTVSS

SEQ ID NO: 2202 - protein, 7 aa, Artificial Sequence
  Synthetic
ATTLPNY

SEQ ID NO: 2203 - protein, 110 aa, Artificial Sequence
  Synthetic
NFMLTQPHSVSESPGKTVTISCTGSSGSIATNYVQWFQQRPGSAPTTVIYEDNQRPSGVPDRFSGSIDSSSNSASLTISGLKTEDEADYYCQSFDSSYWVFGGGTKLTVL

SEQ ID NO: 2204 - protein, 9 aa, Artificial Sequence
  Synthetic
QSFDSSYWV

SEQ ID NO: 2205 - protein, 121 aa, Artificial Sequence; identical to SEQ ID NO: 1529
  Synthetic

SEQ ID NO: 2206 - protein, 14 aa, Artificial Sequence
  Synthetic
ARGVVGATPGSFDL

SEQ ID NO: 2207 - protein, 109 aa, Artificial Sequence
  Synthetic
QSVLTQPASVSGSPGQSITISCTGTSSDVGNYNLVSWYQQHPGKAPKLMIYGVSKRPSGVSYRFSGSKSANTASLTISGLQAEDEADYYCCSYAGSSVIFGGGTKLTVL

SEQ ID NO: 2208 - protein, 9 aa, Artificial Sequence
  Synthetic
CSYAGSSVI

SEQ ID NO: 2209 - protein, 124 aa, Artificial Sequence
  Synthetic
QVQLVQSGAEVKKPGASVRVSCKASGYTFTTYDINWVRQASGQGLEWMGWMNPDSGNTGYAQKFQGRVTMTRNISISTAYLDLSSLQSDDTAVYYCARDYGSGSYYRGNWFDPWGQGTLVIVSS

SEQ ID NO: 2210 - protein, 17 aa, Artificial Sequence
  Synthetic
ARDYGSGSYYRGNWFDP

SEQ ID NO: 2211 - protein, 110 aa, Artificial Sequence; identical to SEQ ID NO: 1903
  Synthetic

SEQ ID NO: 2212 - protein, 10 aa, Artificial Sequence
  Synthetic
SSDAGSNNVV

SEQ ID NO: 2213 - protein, 120 aa, Artificial Sequence
  Synthetic
EVQLVESGGGLVQPGESLRLSCAGSGFTFSSHWMSWVRQAPGKGLEWVANIKEDGSADFYVDSVKGRFTISRDSAKNSLFLQMNSLRAEDTAVYYCARAVTGWFLGIDFWGQGTLVTVSS

SEQ ID NO: 2214 - protein, 13 aa, Artificial Sequence
  Synthetic
ARAVTGWFLGIDF

SEQ ID NO: 2215 - protein, 111 aa, Artificial Sequence
  Synthetic
NFMLTQPHSVSESPGKTVTISCTCSGGTIALNYVQWYQQRPGSAPTTVIYEDNQRPSGVPDRFSGSVDSSSNSASLSISGLKTEDEADYYCQSYDGNYHWVFGGGTKLTVL

SEQ ID NO: 2216 - protein, 10 aa, Artificial Sequence
  Synthetic
QSYDGNYHWV

SEQ ID NO: 2217 - protein, 124 aa, Artificial Sequence
  Synthetic
QVQLVQSGAEVKKPGSSVKVSCKASGGTFSSYAISWVRQAPGQGLEWMGGIVPIFGSANYAQKFQGRVTITADESTSTANMELRSLRFEDTAVYYCARGGYCVGGTCQDWFDPWGQGTLVIVSS

SEQ ID NO: 2218 - protein, 17 aa, Artificial Sequence
  Synthetic
ARGGYCVGGTCQDWFDP

SEQ ID NO: 2219 - protein, 110 aa, Artificial Sequence
  Synthetic
SYVLTQPPSVSVAPGKTARITCGGIDIGSKSVHWYQQKPGQAPLLVIYYDNDRPSGIPERLSGSNSGNTATLTISRVEAGDEADYYCQVWDGTSDHPAYVFGTGTKVSVL

SEQ ID NO: 2220 - protein, 13 aa, Artificial Sequence
  Synthetic
QVWDGTSDHPAYV

SEQ ID NO: 2221 - protein, 120 aa, Artificial Sequence
  Synthetic
QVQLVQSGAEVGKPGSSVRLSCKASRGTFNIYSISWLRQSPGQGLEWVGVITPLFGSSNYAHEFQGRVTLTADESTNTAYMDLSSLTSEDTALYYCATGGESGTSWFDPWGQGTLLTVSS

SEQ ID NO: 2222 - protein, 13 aa, Artificial Sequence
  Synthetic
ATGGESGTSWFDP

SEQ ID NO: 2223 - protein, 110 aa, Artificial Sequence
  Synthetic
QSVLTQPPSASGTPGQRVTISCSGSSSNIGSHPVHWYQQLPGMAPKLLIYISNQRPSGVPDRFSGSKSGTSASLAISGLQSEDEADYYCAAWDDSQNGWVFGGGTKLTVL

SEQ ID NO: 2224 - protein, 11 aa, Artificial Sequence
  Synthetic
AAWDDSQNGWV

SEQ ID NO: 2225 - protein, 126 aa, Artificial Sequence
  Synthetic
EVQLVQSGSEVKKPGESLKISCKASGYSFSYYWIGWVRQMPGKGLDWMGIIYPGDSATRYSPSFQGQVTISADKSISTAYLQWSSLKASDTAMYYCARLSYGHSGYTTVEDWFDPWGQGTLVTVSS

SEQ ID NO: 2226 - protein, 19 aa, Artificial Sequence
  Synthetic
ARLSYGHSGYTTVEDWFDP

SEQ ID NO: 2227 - protein, 110 aa, Artificial Sequence
  Synthetic
QSVLTQPPSVSGAPGQRVTISCAGSSSNIGAGFDVQWYQQLPGRAPKLLIFGNNNRPSGIPARFSGSKSGTSGSLAITGLQAEDEADYYCQSYDSRLSASVFGGGTKLTV

SEQ ID NO: 2228 - protein, 11 aa, Artificial Sequence
  Synthetic
QSYDSRLSASV

SEQ ID NO: 2229 - protein, 116 aa, Artificial Sequence
  Synthetic
EVQLLESGGALVQPGGSLRLSCAASGFTFSIFAMSWVRQAPGKGLEWVSTISDVSTYYADSVKGRFTISRDNSKNTLYLQMNGLRAEDTAVYYCAKTIDTFFFDHWGQGTLVTVSS

SEQ ID NO: 2230 - protein, 11 aa, Artificial Sequence
  Synthetic
AKTIDTFFFDH

SEQ ID NO: 2231 - protein, 108 aa, Artificial Sequence
  Synthetic
SYVLTQPPSVSVAPGKTARITCGGNNIGSKSVYWYQQKPGQAPVLVIYYDSDRPSGIPERFSGSNSGNTATLTISGVEAGDEADYYCQVWDSSSDHWVFGGGTKLTVL

SEQ ID NO: 2232 - protein, 11 aa, Artificial Sequence
  Synthetic
QVWDSSSDHWV

SEQ ID NO: 2233 - protein, 130 aa, Artificial Sequence
  Synthetic
QVQLVQSGAEVKKPGASVKVSCKASGYTFTSYGISWVRQAPGQGLEWMGWISAYNGNTNYAQKLQGRVTMTTDTSTSTAYMELRSLRSDDTAVFYCARDRGGHDFWSGYGFYYYYGMDVWGQGTTVTVSS

SEQ ID NO: 2234 - protein, 23 aa, Artificial Sequence
  Synthetic
ARDRGGHDFWSGYGFYYYYGMDV

SEQ ID NO: 2235 - protein, 107 aa, Artificial Sequence
  Synthetic
DIQMTQSPSSLSASVGDRVTITCRASQGISNYLAWYQQRPGKVPKLLIFAASTLQSGVPSRFSGSGSGTDFTLTISSLQPEDVATYYCQKYNSAPRTFGQGTKVEIK

SEQ ID NO: 2236 - protein, 9 aa, Artificial Sequence
  Synthetic
QKYNSAPRT

SEQ ID NO: 2237 - protein, 115 aa, Artificial Sequence
  Synthetic
EVQLVESGGGLVQPGGSQRLSCAASGFTVSSNYMSWIRQAPGKGLEWVSVIYSGGSAYYVDSVKGRFTISRDNSKNTLYLQMNSLRPEDTAVYYCARIANYMDVWGKGTTVTVSS

SEQ ID NO: 2238 - protein, 9 aa, Artificial Sequence
  Synthetic
ARIANYMDV

SEQ ID NO: 2239 - protein, 108 aa, Artificial Sequence
  Synthetic
EIVMTQSPATLSVSPGERATLSCRASQSVSSHLAWYQQKPGQAPRLLIYGASTRATGIPTRFSGSGSGTEFTLTISSLQSEDFAVYYCQQYNNWPPLTFGGGTKVEIK

SEQ ID NO: 2240 - protein, 10 aa, Artificial Sequence
  Synthetic
QQYNNWPPLT

SEQ ID NO: 2241 - protein, 120 aa, Artificial Sequence
  Synthetic
QVQLQESGPGLVKPSGTLSLTCAVSGGSISSSNWWSWVRQPPGKGLEWIGEIYHSGTTNYNPSLKSRVTISVDKSKNQFSLKLSSVTAADTAVYYCARTWIQPHNWFDPWGQGTLVTVSS

SEQ ID NO: 2242 - protein, 13 aa, Artificial Sequence
  Synthetic
ARTWIQPHNWFDP

SEQ ID NO: 2243 - protein, 108 aa, Artificial Sequence
  Synthetic
DIQMTQSPSSLSASVGDRVTITCRASQGISNYLAWFQQKPGKAPKSLIYAASSLQSGVPSKFSGSGSGTDFTLTISSLQPEDFATYYCQQYNSYPLFTFGPGTKVDIK

SEQ ID NO: 2244 - protein, 10 aa, Artificial Sequence
  Synthetic
QQYNSYPLFT

SEQ ID NO: 2245 - protein, 126 aa, Artificial Sequence
  Synthetic
EVQLVESGGGLVKPGGSLRLSCAASGFTFSSYSMNWVRQAPGKGLEWVSSISSSSSYIYYADSVKGRFTISRDNAKNSLYLQMNSLRAEDTAVYYCAREAARRYDFWSGLNWFDPWGQGTLVTVSS

SEQ ID NO: 2246 - protein, 19 aa, Artificial Sequence
  Synthetic
AREAARRYDFWSGLNWFDP

SEQ ID NO: 2247 - protein, 113 aa, Artificial Sequence
  Synthetic
  misc_feature (15)..(15): Xaa can be any naturally occurring amino acid
DIVMTQSPDSLAVSXGERATINCKSSQSVLYSSNNKNYLAWYQQKPGQPPKLLIYWASTRESGVPDRFSGSGSGTDFTLTISSLQAEDVAVYYCQQYYSTMLTFGGGTKVEIK

SEQ ID NO: 2248 - protein, 9 aa, Artificial Sequence
  Synthetic
QQYYSTMLT

SEQ ID NO: 2249 - protein, 117 aa, Artificial Sequence
  Synthetic
EVQLVESGGGLVQPGGSLRLSCAASGFTVSSNYMSWVRQAPGKGLEWVSVIYSGGSAYYADSVKGRFTISRDNSKNTLYLQMNSLRAEDTAVYYCARDYGDFYFDYWGQGTLVTVSS

SEQ ID NO: 2250 - protein, 11 aa, Artificial Sequence
  Synthetic
ARDYGDFYFDY

SEQ ID NO: 2251 - protein, 107 aa, Artificial Sequence
  Synthetic
EIVMTQSPATLSVSPGERATLSCRASQSVSSNLAWYQQKPGQAPRLLIYGASTRATGIPARFSGSGSGTEFTLTISSLQSEDFAVYYCQQYNNWPRTFGQGTKVEIK

SEQ ID NO: 2252 - protein, 9 aa, Artificial Sequence
  Synthetic
QQYNNWPRT

SEQ ID NO: 2253 - protein, 122 aa, Artificial Sequence; identical to SEQ ID NO: 1633
  Synthetic

SEQ ID NO: 2254 - protein, 13 aa, Artificial Sequence
  Synthetic
TTTNDYGDYSPAY

SEQ ID NO: 2255 - protein, 107 aa, Artificial Sequence
  Synthetic
DIQMTQSPSSLSASVGDRVTITCRASQSISSYLNWYQQKPGKAPKLLIYAASSLQSGVPSRFSGSGSGTAFTLTISSLQPEDFATYYCQQSYSTPLTFGGGTKVEIK

SEQ ID NO: 2256 - protein, 9 aa, Artificial Sequence
  Synthetic
QQSYSTPLT

SEQ ID NO: 2257 - protein, 121 aa, Artificial Sequence
  Synthetic
QVQLVQSGAEVKKPGASVKVSCKASGYTFTSHYMHWVRQAPGQGLEWMGIINPSGGGTSYAQKFQGRVTMTRDTSMSTVYMELSSLRSEDTAVYYCASSSSTPDYYGMDVWGQGTTVTVSS

SEQ ID NO: 2258 - protein, 14 aa, Artificial Sequence
  Synthetic
ASSSSTPDYYGMDV

SEQ ID NO: 2259 - protein, 108 aa, Artificial Sequence
  Synthetic
DIQLTQSPSFLSASVGDRVTITCRASQGISSYLAWYQQKPGKAPKLLIYGASTLQSGVPSRFSGSGSGTEFTLTISSLQPEDFATYYCQQLNSYPLCSFGQGTKLEIK

SEQ ID NO: 2260 - protein, 10 aa, Artificial Sequence
  Synthetic
QQLNSYPLCS

SEQ ID NO: 2261 - protein, 117 aa, Artificial Sequence
  Synthetic
EVQLVESGGGLIQPGGSLRLSCAASGFTVSSNYMSWVRQAPGKGLEWVSVIYSGGSTYYADSVKGRFTISRDNSKNTLYLQMNSLRAEDTAVYYCARDYGDYYFDYWGQGTLVTVSS

SEQ ID NO: 2262 - protein, 11 aa, Artificial Sequence
  Synthetic
ARDYGDYYFDY

SEQ ID NO: 2263 - protein, 107 aa, Artificial Sequence; identical to SEQ ID NO: 2251
  Synthetic

SEQ ID NO: 2264 - protein, 9 aa, Artificial Sequence
  Synthetic
QQYNNWPRT

SEQ ID NO: 2265 - protein, 123 aa, Artificial Sequence
  Synthetic
QVQLVESGGGVVQPGRSLRLSCAASGFTFNNYGMHWVRQAPGKGLEWVAVISYDGNNKYYADSVKDRFTISRDNSKNTLYLQMNNLRAEDTAMYYCARAGWELLRIRYYFDFWGQGTLVTVSS

SEQ ID NO: 2266 - protein, 16 aa, Artificial Sequence
  Synthetic
ARAGWELLRIRYYFDF

SEQ ID NO: 2267 - protein, 107 aa, Artificial Sequence
  Synthetic
DIQMTQSPSSLSASVGDRVTITCQASQDISNYLNWYQQKPGKAPKFLIYGASNLETGVPPRFSGSGSGTDFTFIISSLQPEDIATYYCQQYDNLPPTFGGGTKVEIK

SEQ ID NO: 2268 - protein, 9 aa, Artificial Sequence
  Synthetic
QQYDNLPPT

SEQ ID NO: 2269 - protein, 129 aa, Artificial Sequence
  Synthetic
QVQLVQSGAEVKKPGASVKVSCKASGYTFTSYNITWVRQAPGQGLEWVGWISAYNGNTNYAQKFQGRVTMTTDTSTSTAYMELRSLRSDDTAVYYCARVPRGYYDRSGYYYLPHYLDYWGQGTLVTVSS

SEQ ID NO: 2270 - protein, 22 aa, Artificial Sequence
  Synthetic
ARVPRGYYDRSGYYYLPHYLDY

SEQ ID NO: 2271 - protein, 108 aa, Artificial Sequence
  Synthetic
DIQMTQSPSSLSASVGDRVTITCQASQDISNYLNWYQQKPGKPPKLLIYDASNLETGVPSRFSGSGSGTDFIFSISSLQPEDIATYYCQQYDSLPGCSFGQGTKLEIK

SEQ ID NO: 2272 - protein, 10 aa, Artificial Sequence
  Synthetic
QQYDSLPGCS

SEQ ID NO: 2273 - protein, 117 aa, Artificial Sequence
  Synthetic
EVQLVESGGGLVKPGGSLRLSCAASGFTFSTYSMNWVRQAPGKGLEWVSSISSSSSYIYYADSVKGRFTISRDNAKNSLYLQMNSLRAEDTAVYYCARVVANWFDPWGQGTLVTVSS

SEQ ID NO: 2274 - protein, 10 aa, Artificial Sequence
  Synthetic
ARVVANWFDP

SEQ ID NO: 2275 - protein, 116 aa, Artificial Sequence
  Synthetic
  misc_feature (15)..(15): Xaa can be any naturally occurring amino acid
DIVMTQSPDSLAVSXGERATINCKSSQSVLYSSNNKNYLAWYQQKPGQPPKLLIYWASTRESGVPDRFSGSGSGTDFTLTISSLQAEDVAVYYCQQYYSTPQPSWTFGQGTKVEIK

SEQ ID NO: 2276 - protein, 12 aa, Artificial Sequence
  Synthetic
QQYYSTPQPSWT

SEQ ID NO: 2277 - protein, 119 aa, Artificial Sequence
  Synthetic
EVQLVETGGGLIQPGGSLRLSCAASGFTVSSNYMSWVRQAPGKGLEWVSVIYSGGSTFYADSVKGRFTISRDNSKNTLYLQMNSLRAEDTAVYYCARAISESPRYGVYWGQGTLVTVSS

SEQ ID NO: 2278 - protein, 13 aa, Artificial Sequence
  Synthetic
ARAISESPRYGVY

SEQ ID NO: 2279 - protein, 107 aa, Artificial Sequence
  Synthetic
DIQMTQSPSSLSASVGDRVTITCQASQDISNYLNWYQQKPGKAPKLLIYDASNLETGVPSRFSGSGSGTDFTFTISSLQPEDIATYYCQQYDNLPLTFGQGTRLEIK

SEQ ID NO: 2280 - protein, 9 aa, Artificial Sequence
  Synthetic
QQYDNLPLT

SEQ ID NO: 2281 - protein, 130 aa, Artificial Sequence
  Synthetic
QVQLVESGGGVVQPGRSLRLSCAASGFTFRTYAMHWVRQAPGKGLEWVAVILSDGNNKYYADSVKGRFTISRDNSKNTLYLQMNSLRAEDTAIFYCAREQEANYYDISGYYHWGESLGYWGQGTLVTVPS

SEQ ID NO: 2282 - protein, 23 aa, Artificial Sequence
  Synthetic
AREQEANYYDISGYYHWGESLGY

SEQ ID NO: 2283 - protein, 108 aa, Artificial Sequence
  Synthetic
DIQLTQSPSFLSASVGDRVTITCRASQGISSYLAWYQQKPGKAPKLLIYGASTLQSGVPSRFSGSGSGTEFTLTISSLQPEDFASYYCQKVNSHPPGLTFGGGTKVEI

SEQ ID NO: 2284 - protein, 11 aa, Artificial Sequence
  Synthetic
QKVNSHPPGLT

SEQ ID NO: 2285 - protein, 121 aa, Artificial Sequence
  Synthetic
QVQLVESGGGVVQPGRSLRLSCAASGLTFSFYAIHWVRQAPGKGLEWVAYISYEGSDKYYADSVKGRFTISRANSKSTLYLQMNSLRAEDTAVYYCYALFERGNWNDAEYWGQGTLVTVSS

SEQ ID NO: 2286 - protein, 14 aa, Artificial Sequence
  Synthetic
YALFERGNWNDAEY

SEQ ID NO: 2287 - protein, 112 aa, Artificial Sequence
  Synthetic
DVVMTQSPLSLPVTLGQPASISCRSSQSLVHSDGNIYLSWYQQRPGQSPRRLIYKVSNRDSGVPDRFSASGSGTDFTLRISRVEAEDVGVYYCMQGTHWPRTFGQGTKLEIK

SEQ ID NO: 2288 - protein, 9 aa, Artificial Sequence
  Synthetic
MQGTHWPRT

SEQ ID NO: 2289 - protein, 118 aa, Artificial Sequence
  Synthetic
QVQLVQSGAEVKKPGSSVKVSCKASGGTFSSYAISWVRQAPGQGLEWMGGIIPIFGTANYAQKFQGRVTITADESTSTAYMELSSLRSEDTAVYYCARVGYGYYFDYWGQGTLVTVSS

SEQ ID NO: 2290 - protein, 11 aa, Artificial Sequence
  Synthetic
ARVGYGYYFDY

SEQ ID NO: 2291 - protein, 106 aa, Artificial Sequence
  Synthetic
EIVLTQSPATLSLSPGERATLSCRASQSVSSYLAWYQQKPGQAPRLLIYDASNRATGIPARFSGSGSGTDFTLTISSLEPEDFAVYYCQQRSNWPSFGQGTKLEIK

SEQ ID NO: 2292 - protein, 8 aa, Artificial Sequence
  Synthetic
QQRSNWPS

SEQ ID NO: 2293 - protein, 118 aa, Artificial Sequence
  Synthetic
EVQLVESGGGLVQPGGSLRLSCAASGFTVSSNYMSWVRQAPGKGLEWVSVIYSGGSAYYADSVKGRFTISRDNSKNTLYLQMNSLRAEDTAVYYCARDSTPGYGDYISGQGTLVTVSS

SEQ ID NO: 2294 - skipped

SEQ ID NO: 2295 - protein, 107 aa, Artificial Sequence; identical to SEQ ID NO: 1203
  Synthetic

SEQ ID NO: 2296 - protein, 9 aa, Artificial Sequence
  Synthetic
QQYDNLPIT

SEQ ID NO: 2297 - protein, 125 aa, Artificial Sequence
  Synthetic
QVQLVESGGGVVQPGRSLRLSCTASGFTFSSYGMHWVRQAPGKGLEWVAVISYDGSNKYYADSVKGRFTISRDNSKNTLYLQMNSLRAEDTAVYYCAKVGLGYSSGWYGEEIDYWGQGTLVTVSS

SEQ ID NO: 2298 - protein, 18 aa, Artificial Sequence
  Synthetic
AKVGLGYSSGWYGEEIDY

SEQ ID NO: 2299 - protein, 107 aa, Artificial Sequence
  Synthetic
DIQMTQSPSSLSASVGDRVTITCRASQSISSFLNWYQQKPGKAPNLLIYAASSLQSGVPSRFSGSGSGTDFTLTISSLQPEDFATYYCQQSYRTPLTFGGGTKVEIK

SEQ ID NO: 2300 - protein, 9 aa, Artificial Sequence
  Synthetic
QQSYRTPLT

SEQ ID NO: 2301 - protein, 127 aa, Artificial Sequence
  Synthetic
QVQLVESGGGVVQPGRSLRLSCAASGFTFSSYGMHWVRQAPGKGLEWVAVIWYDGSNKYYADSVKGRFTISRDNSKNTLYLQMNSLRAEDTAVYYCARGGRYYDSSGYNGTYEFDYWGQGTLVTVSS

SEQ ID NO: 2302 - protein, 20 aa, Artificial Sequence
  Synthetic
ARGGRYYDSSGYNGTYEFDY

SEQ ID NO: 2303 - protein, 108 aa, Artificial Sequence
  Synthetic
EIVMTQSPATLSVSPGERATLSCRASQSVSSNLAWYQQKPGQAPRLLIYGASTRATGIPARFSGSGSGTEFTLTISSLQSEDFAVYYCQQYNNWPPVTFGPGTKVDIK

SEQ ID NO: 2304 - protein, 10 aa, Artificial Sequence
  Synthetic
QQYNNWPPVT

SEQ ID NO: 2305 - protein, 128 aa, Artificial Sequence
  Synthetic
QVQLQESGPGLVKPSETLSLTCTVSGGSISNYYWSWIRQPPGKGLEWIGYIYTSGSTNYNPSLKSRVTISVDTSKNQFSLKLSSVTAADTAVYYCARGPPRLLWFGESPPTYWYFNLWGRGTLVTVSS

SEQ ID NO: 2306 - protein, 22 aa, Artificial Sequence
  Synthetic
ARGPPRLLWFGESPPTYWYFNL

SEQ ID NO: 2307 - protein, 113 aa, Artificial Sequence
  Synthetic
  misc_feature (15)..(15): Xaa can be any naturally occurring amino acid
DIVMTQSPDSLAVSXGERATINCKSSQSVLYSSNNKNYLAWYQQKPRQPPKLLIYWASTRESGVPDRISGSGSGTDFTLTISSLQAEDVAVYYCQQYYSTPLTFGGGTKVEIK

SEQ ID NO: 2308 - protein, 9 aa, Artificial Sequence
  Synthetic
QQYYSTPLT

SEQ ID NO: 2309 - protein, 116 aa, Artificial Sequence
  Synthetic
QVQLQESGPGLVKPSGTLSLTCAVSGGSISSSNWWSWVRQPPGKGLEWIGEIYHSGSTNYNPSLKSRVTISVDKSKNQFSLKLSSVTAADTAVYYCARVAAFLDYWGQGTLVTVSS

SEQ ID NO: 2310 - protein, 9 aa, Artificial Sequence
  Synthetic
ARVAAFLDY

SEQ ID NO: 2311 - protein, 106 aa, Artificial Sequence
  Synthetic
DIQMTQSPSSLSASVGDRVTITCRASQGISNSLAWYQQKPGKAPKLLLYAASRLESGVPSRFSGSGSGTDYTLTISSLQPEDFATYYCQQYYSTRTFGQGTKVEIK

SEQ ID NO: 2312 - protein, 8 aa, Artificial Sequence
  Synthetic
QQYYSTRT

SEQ ID NO: 2313 - protein, 125 aa, Artificial Sequence
  Synthetic
QVQLVQSGAEVKKPGSSVKVSCKASGGTFSSDAISWVRQAPGQGLEWMGGIMPIFGTANYAQKFQGRVTITADESTSTAYMELSSLRSEDTAVYYCARDLRYCSGGRCLWWFDPWGQGTLVTVSS

SEQ ID NO: 2314 - protein, 18 aa, Artificial Sequence
  Synthetic
ARDLRYCSGGRCLWWFDP

SEQ ID NO: 2315 - protein, 107 aa, Artificial Sequence
  Synthetic
DIQMTQSPSSLSASVGDRVTITCRASQSINNYLNWYQQKPGKAPKLLIYAASSLQSGVPSRFSGSGSGTDFTLTISSLQPEDFATYYCQQSYSTPRTFGPGTKVDIK

SEQ ID NO: 2316 - protein, 9 aa, Artificial Sequence
  Synthetic
QQSYSTPRT

SEQ ID NO: 2317 - protein, 123 aa, Artificial Sequence
  Synthetic
QVQLVESGGGVVQPGRSLRLSCAASGFTFSSYGMHWVRQAPGKGLEWVAVTSYDGTNKYYADSVKGRFTISRDNSKNTLYLQMNSLRAEDTAVYFCAKNVGTGYNVMYYFDYWGQGTLVTVSS

SEQ ID NO: 2318 - protein, 16 aa, Artificial Sequence
  Synthetic
AKNVGTGYNVMYYFDY

SEQ ID NO: 2319 - protein, 107 aa, Artificial Sequence
  Synthetic
DIQMTQSPSSLSASVGDRVTITCQASQDISNYLNWYQQKPGKAPKLLIYDTSNLERGVPSRFSGSGSGSDFTFTISSLQPEDIATYYCQQYDNLPITFGQGTRLEIK

SEQ ID NO: 2320 - protein, 9 aa, Artificial Sequence
  Synthetic
QQYDNLPIT

SEQ ID NO: 2321 - protein, 128 aa, Artificial Sequence
  Synthetic
QVQLVQSGAEVKKPGSSVKVSCKASGGTFSSNYAISWVRQAPGQGLEWMGGIIPIFGTANYAQKLQGRVTITTDESTSTAYMELSSLRSEDTAVYYCARYTYYYDRSGYYRPDYFDYWGQGTLVTVSS

SEQ ID NO: 2322 - protein, 20 aa, Artificial Sequence
  Synthetic
ARYTYYYDRSGYYRPDYFDY

SEQ ID NO: 2323 - protein, 107 aa, Artificial Sequence
  Synthetic
AIQLTQSPSSLSASVGDRVTITCRASQGISTVLAWYQQKPGKTPKLLIYDASSLESGAPSRFSGSGSGTDFTLTISSLQPEDFATYYCQQFNSYQLTFGGGTKVEIK

SEQ ID NO: 2324 - protein, 9 aa, Artificial Sequence
  Synthetic
QQFNSYQLT

SEQ ID NO: 2325 - protein, 117 aa, Artificial Sequence
  Synthetic
EVQLVESGGGLIQPGGSLRLSCAASGFIVSSNYMSWVRQAPGKGLEWVSVIYSGGSTFYADSVKGRFTISRDNSKNTLYLQMNSLRAEDTAVYYCARDFGEFYFDYWGQGTLVTVSS

SEQ ID NO: 2326 - protein, 11 aa, Artificial Sequence
  Synthetic
ARDFGEFYFDY

SEQ ID NO: 2327 - protein, 107 aa, Artificial Sequence
  Synthetic
EIVMTQSPATLSVSPGERATLSCRASQSVSSNLAWYQQKPGQAPRLLIYGASTRATAIPARFSGSGSGTEFTLTISSLQSEDFAVYYCQQYNNWPRTFGQGTKVEIK

SEQ ID NO: 2328 - protein, 9 aa, Artificial Sequence
  Synthetic
QQYNNWPRT

SEQ ID NO: 2329 - protein, 122 aa, Artificial Sequence
  Synthetic
QVQLVESGGGVVQPGRSLRLSCAASGFTFSGYDIHWVRQAPGKGLEWVAVISYDGSSKFYADSVKGRFTISRDNSKNTLYLQMNSLRAEDTAVYYCAKDLGSSLYYDAFDIWGQGTMVTVSS

SEQ ID NO: 2330 - protein, 15 aa, Artificial Sequence
  Synthetic
AKDLGSSLYYDAFDI

SEQ ID NO: 2331 - protein, 108 aa, Artificial Sequence
  Synthetic
DIQMTQSPSSLSASVGDRLTITCRASQSITSYLNWYQQKPGKAPKLLIYAASSLQSGVPSRFSGSGSGTDFTLTISSLQPEDFATYYCQQSYSTPPWTFGQGTKVEIK

SEQ ID NO: 2332 - protein, 10 aa, Artificial Sequence
  Synthetic
QQSYSTPPWT

SEQ ID NO: 2333 - protein, 123 aa, Artificial Sequence
  Synthetic
QVQLVESGGGVVQPGRSLRLSCAASGFMFSSYGMHWVRQAPGKGLEWVAVIWYDGSNKYYADSVKGRFTISRDNSKNTLYLQMNSLRAEDTAVYYCARDGLNWNVPHYGMDVWGQGTTVTVSS

SEQ ID NO: 2334 - protein, 16 aa, Artificial Sequence
  Synthetic
ARDGLNWNVPHYGMDV

SEQ ID NO: 2335 - protein, 108 aa, Artificial Sequence
  Synthetic
DIQMTQSPSSVSASVGDRVTITCRASQGISSWLAWYQQKPGKAPKLLIYAASSLQSGVPSRFSGSGSGTDFTLTISSLQPEDFATYYCQQANSFPPLTFGGGTKVEIK

SEQ ID NO: 2336 - protein, 10 aa, Artificial Sequence
  Synthetic
QQANSFPPLT

SEQ ID NO: 2337 - protein, 125 aa, Artificial Sequence
  Synthetic
QVQLVESGGGVVQPGRSLRLSCAASGFTFSTYGMHWVRQAPGKGLEWVAVISYDGSNKYFADSVKGRFTISRDNSKNTLYLQMNSLRPEDTAVYYCAKVGMEYSSGWYGEEIDFWGQGTLVTVSS

SEQ ID NO: 2338 - protein, 18 aa, Artificial Sequence
  Synthetic
AKVGMEYSSGWYGEEIDF

SEQ ID NO: 2339 - protein, 107 aa, Artificial Sequence
  Synthetic
DIQMTQSPSSLSASVGDRVTITCRASQSISSYLNWYQQKPGKVPKLLIYAASSLQSGVPSRFSGSGSGTDFTLTISSLQPEDFATYYCQQSYRTPLTFGGGTKVEIK

SEQ ID NO: 2340 - protein, 9 aa, Artificial Sequence
  Synthetic
QQSYRTPLT

SEQ ID NO: 2341 - protein, 125 aa, Artificial Sequence
  Synthetic
QVQLVQSGAEVKKPGASVKVSCKASGYTFTSYGISWVRQAPGQGLEWMGWISAYNGNTNYAQKLQGRVTMTTDTSTSTAYMELRSLRSDDTAVYYCARDSAYSGYDFFEAPRDYWGQGTLVTVSS

SEQ ID NO: 2342 - protein, 18 aa, Artificial Sequence
  Synthetic
ARDSAYSGYDFFEAPRDY

SEQ ID NO: 2343 - protein, 106 aa, Artificial Sequence
  Synthetic
DIQMTQSPSSLSASVGDRVTITCRASQSISSFLNWYQQKPGKAPKLLIYAASSLHSGVPSRFSGSGSGTDFTLTISSLQPEDFATYYCQQSYRTPPLFGGGTKVEI

SEQ ID NO: 2344 - protein, 9 aa, Artificial Sequence
  Synthetic
QQSYRTPPL

SEQ ID NO: 2345 - protein, 120 aa, Artificial Sequence
  Synthetic
EVQLVESGGGLVKPGGSLRLSCAASGLTFTAYRMNWVRQAPGKGLEWLSSISNTNGDIYYADSVKGRFTISRDNAKNSLYLQMNSLRADDTAVYYCARDVASNYAYFDLWGQGTLVTVSS

SEQ ID NO: 2346 - protein, 13 aa, Artificial Sequence
  Synthetic
ARDVASNYAYFDL

SEQ ID NO: 2347 - protein, 108 aa, Artificial Sequence
  Synthetic
DIQMTQSPSSLSASVGDRVTITCRASQSISSYLNWYQQKPGKAPKLLIYAASSLQSGVPSRFSGSGSGTDFTLTISSLQPEDFATYYCQQSYSTPPLTFGGGTKVEIK

SEQ ID NO: 2348 - protein, 10 aa, Artificial Sequence
  Synthetic
QQSYSTPPLT

SEQ ID NO: 2349 - protein, 127 aa, Artificial Sequence
  Synthetic
QVQLVESGGGVVQPGRSLRLSCAASGFTFSRYGMHWVRQAPGKGLEWVAVMSYDGSSKYYADSVKGRFTISRDNSKNTLCLQMNSLRAEDTAVYYCAKQAGPYCSGGSCYSAPFDYWGQGTLVTVSS

SEQ ID NO: 2350 - protein, 20 aa, Artificial Sequence
  Synthetic
AKQAGPYCSGGSCYSAPFDY

SEQ ID NO: 2351 - protein, 107 aa, Artificial Sequence
  Synthetic
DIQMTQSPSSLSASVGDRVTITCQASQGISNYLNWYQQKPGKAPKLLIYDASNLETGVPSRFSGSGSGTDFTFTISSLQPEDIATYYCQQYDNLPITFGQGTRLEIK

SEQ ID NO: 2352 - protein, 9 aa, Artificial Sequence
  Synthetic
QQYDNLPIT

SEQ ID NO: 2353 - protein, 117 aa, Artificial Sequence
  Synthetic
EVQLVESGGGLIQPGGSLRLSCAASGFTVSSNYMSWVRQAPGKGLEWVSVIYSGGSTYYADSVKGRFTISRDNSKNTLYLQMNSLRAEDTAVYYCARDRVIYGMDVWGQGTTVTVSS

SEQ ID NO: 2354 - protein, 11 aa, Artificial Sequence
  Synthetic
ARDRVIYGMDV

SEQ ID NO: 2355 - protein, 107 aa, Artificial Sequence
  Synthetic
DIQMTQSPSSLSASVGDRVTITCQASQDISNYLNWYQQKPGKAPKLLIYDASNLETGVPSRFSGSGSGTDFTFTISSLQPEDIATYYCQQYDNLPQTFGGGTKVEIK

SEQ ID NO: 2356 - protein, 9 aa, Artificial Sequence
  Synthetic
QQYDNLPQT

SEQ ID NO: 2357 - protein, 125 aa, Artificial Sequence
  Synthetic
EVQLVESGGGLVQPGGSLRLSCAASGFSVSTKYMTWVRQAPGKGLEWVSALYSGGSDYYADSVKGRFTISRDNSKNTLYLQMSSLRVEDTGVYYCARDSSEVRDHPGHPGRSVGAFDIWGQGTMV

SEQ ID NO: 2358 - protein, 23 aa, Artificial Sequence
  Synthetic
ARDSSEVRDHPGHPGRSVGAFDI

SEQ ID NO: 2359 - protein, 113 aa, Artificial Sequence
  Synthetic
  misc_feature (15)..(15): Xaa can be any naturally occurring amino acid
DIVMTQSPDSLAVSXGERATINCKSSQSVLYSSNNKNYLAWYQQKPGQPPKLLIYWASTRESGVPDRFSGSGSGTDFTLTISSLQAEDVAVYYCQQYYSTPLTFGGGTKVEIK

SEQ ID NO: 2360 - protein, 9 aa, Artificial Sequence
  Synthetic
QQYYSTPLT

SEQ ID NO: 2361 - protein, 115 aa, Artificial Sequence
  Synthetic
EVQLVESGGGLVQPGGSQRLSCAASGFTVSSNYMSWIRQAPGKGLEWVSVIYSGGSAYYVDSVKGRFTISRDNSKNTLYLQMNSLRAEDTAVYYCARIANYMDVWGKGTTVTVSS

SEQ ID NO: 2362 - protein, 9 aa, Artificial Sequence
  Synthetic
ARIANYMDV

SEQ ID NO: 2363 - protein, 108 aa, Artificial Sequence; identical to SEQ ID NO: 2239
  Synthetic

SEQ ID NO: 2364 - protein, 10 aa, Artificial Sequence
  Synthetic
QQYNNWPPLT

SEQ ID NO: 2365 - protein, 130 aa, Artificial Sequence
  Synthetic
QVQLVQSGAEVKKPGASVKVSCKASGYNFTSYGISWVRQAPGQGLEWMGWISGYNGNTNYGQKFQGGVTMTTDTSTSTAYMELRSLRSDDTAVYYCARDRGGHNFWSGYGYYYYYGMDVWGQGTTVTVSS

SEQ ID NO: 2366 - protein, 23 aa, Artificial Sequence
  Synthetic
ARDRGGHNFWSGYGYYYYYGMDV

SEQ ID NO: 2367 - protein, 107 aa, Artificial Sequence
  Synthetic
  misc_feature (12)..(12): Xaa can be any naturally occurring amino acid
DIQMTQSPSSLXASVGDRVTITCRASQGISNYLAWYQQKPGKVPKLLIYAASTLQSGVPSRFSGSESGTDFTLTISSLQPEDVATYYCQKYNSAPRTFGQGTKVEIK

SEQ ID NO: 2368 - protein, 9 aa, Artificial Sequence
  Synthetic
QKYNSAPRT

SEQ ID NO: 2369 - protein, 119 aa, Artificial Sequence
  Synthetic
EVQLVESGGGLIQPGGSLRLSCAASGLTVSSNYMSWVRQAPGKGLEWVSVMYSGGSVFYADSVKGRFTISRDNSKNTLYLQMNSLRAEDTAVYYCARLLVATIKDFDSWGQGTLVTVSS

SEQ ID NO: 2370 - protein, 13 aa, Artificial Sequence
  Synthetic
ARLLVATIKDFDS

SEQ ID NO: 2371 - protein, 108 aa, Artificial Sequence
  Synthetic
EIVMTQSPATLSVSPGERATLSCRASQSVSSNLAWYQQKPGQAPRLLIYGASTRATGISARFSGSGSGTEFSLTISSLQSEDFAVYYCQQYNDWPPWTFGQGTKVEIK

SEQ ID NO: 2372 - protein, 10 aa, Artificial Sequence
  Synthetic
QQYNDWPPWT

SEQ ID NO: 2373 - protein, 122 aa, Artificial Sequence; identical to SEQ ID NO: 85
  Synthetic

SEQ ID NO: 2374 - protein, 15 aa, Artificial Sequence
  Synthetic
VKDKEHSTMVTIFDF

SEQ ID NO: 2375 - protein, 107 aa, Artificial Sequence
  Synthetic
DIQMTQSPSSLSASVGDRVTITCRASQSISSFLNWYQQKPGKAPKLLIYAASSLQSGVPSRFSGRGSGADFTLTITSLQPEDFATYFCQQSYSSHLTFGPGTTVDIK

SEQ ID NO: 2376 - protein, 9 aa, Artificial Sequence
  Synthetic
QQSYSSHLT

SEQ ID NO: 2377 - protein, 124 aa, Artificial Sequence
  Synthetic
QVQLVESGGGVVQPGKSLTLSCEGSGFTFGRYGMHWVRQAPGKGLEWVAGILYDGSNEYYADSVKGRFSISRDNSNNTLYLQMNSLRAEDTAVYYCAKALFFYFDTSGGTFDYWGQGTLVTVSS

SEQ ID NO: 2378 - protein, 17 aa, Artificial Sequence
  Synthetic
AKALFFYFDTSGGTFDY

SEQ ID NO: 2379 - protein, 102 aa, Artificial Sequence
  Synthetic
DIQMTQSPSSLSASVGDRVTITCQASQEITNYLNWYQQKPRKAPKLLISDASHLETGVPSRFSGSGSGTNFTFTISRLQPEDFATYYCQQGFTFGPGTKVDI

SEQ ID NO: 2380 - protein, 5 aa, Artificial Sequence
  Synthetic
QQGFT

SEQ ID NO: 2381 - protein, 122 aa, Artificial Sequence
  Synthetic
QVQLVQSGAEVKKPGASVKVSCKASGYTFSDHYMHWVRQAPRQGLEWMGIINPSAGSITYAQKLEGRVTMTSDTSTNTVYMELSSLRSEDTAVYYCARDSGFITFSEAFDIWGQGTMVTVSS

SEQ ID NO: 2382 - protein, 15 aa, Artificial Sequence
  Synthetic
ARDSGFITFSEAFDI

SEQ ID NO: 2383 - protein, 108 aa, Artificial Sequence
  Synthetic
EIVLTQSPGTLSLSPGERATLSCRASQSVRSRYLAWYQQKPGQAPRLLIYGASSRATDIPDRFSGSGSGTEFTLTISRLEPEDFAVYYCQQYGSSPRTFGQGTKVEIK

SEQ ID NO: 2384 - protein, 9 aa, Artificial Sequence
  Synthetic
QQYGSSPRT

SEQ ID NO: 2385 - protein, 131 aa, Artificial Sequence
  Synthetic
QVQLVQSGAEVKKPGSSVKVSCKASGGMFSSYAISWVRQAPGQGLEWMGGILPMSATADYVQKFQGRVTIVADESTSTVYMELSRLTSEDTAVYYCARGSLAVAGSLVFPPNYYYYDMDVWGRGTTVTVSS

SEQ ID NO: 2386 - protein, 24 aa, Artificial Sequence
  Synthetic
ARGSLAVAGSLVFPPNYYYYDMDV

SEQ ID NO: 2387 - protein, 112 aa, Artificial Sequence
  Synthetic
DVVMTQSPLSLPVTLGQPASISCKASQSLVYSDGNIYLNWVQQRPGQSPRRLIYKVSNRDSGVPDRFSGSGSGTDFTLKISRVEAEDVGVYYCVQGTHWPCSFGQGTKLEIK

SEQ ID NO: 2388 - protein, 9 aa, Artificial Sequence
  Synthetic
VQGTHWPCS

SEQ ID NO: 2389 - protein, 119 aa, Artificial Sequence
  Synthetic
EVQLVETGGDLIQPGGSLRLSCAVSGFSVSDNHMIWVRQAPGKGLEWVSVIYDGGSTDYGDTVKGRFTISRDNSKNTVSLQMNSLRVEDTAVYYCARMDSSSWSWFDPWGQGTLVTVSS

SEQ ID NO: 2390 - protein, 13 aa, Artificial Sequence
  Synthetic
ARMDSSSWSWFDP

SEQ ID NO: 2391 - protein, 107 aa, Artificial Sequence
  Synthetic
DIQMTQSPSSLSASVGDRVTITCRASQSISDFLNWYQQKPGKAPQLLIFAASTLQRGVPSRFGGSGSGSEFTLFISSLQPEDFATYYCQQSYSSPPTFGQGTKIDIK

SEQ ID NO: 2392 - protein, 9 aa, Artificial Sequence
  Synthetic
QQSYSSPPT

SEQ ID NO: 2393 - protein, 117 aa, Artificial Sequence
  Synthetic
EVQLVESGGGLIQPGGSLRLSCAASEFVVSRNYMSWVRQAPKKGLEWVSVLYSGGSTFYADSVKGRFTISRDDSRNMLYLQMNSLRAEDTAVYYCVRDFGEFYFDYWGQGVLVTVSS

SEQ ID NO: 2394 - protein, 11 aa, Artificial Sequence
  Synthetic
VRDFGEFYFDY

SEQ ID NO: 2395 - protein, 107 aa, Artificial Sequence
  Synthetic
  misc_feature (58)..(58): Xaa can be any naturally occurring amino acid
  misc_feature (84)..(84): Xaa can be any naturally occurring amino acid
  misc_feature (87)..(87): Xaa can be any naturally occurring amino acid
EIVMTQSPATLSVSPGERATLSCRASQSLSSNLAWYQQKPGQAPRLLIFGASTRATGXPARFSGSGSGTEFTLTISSLQSEDFXVYXCQQYYSGPRTFGQGTKVEIK

SEQ ID NO: 2396 - protein, 9 aa, Artificial Sequence
  Synthetic
QQYYSGPRT

SEQ ID NO: 2397 - protein, 131 aa, Artificial Sequence
  Synthetic
QVQLQQWGAGLLKPSETLSLTCAGHGGSFSSYYWSWIRQTPGKGLEWIGEINHSGTTHYNPSLKSRVTISVDTSRNQFSLKLSSVTAADTAVYYCARAKFPPGYYDILNGYTEKGYYFDYWGQGTLVTVSS

SEQ ID NO: 2398 - protein, 25 aa, Artificial Sequence
  Synthetic
ARAKFPPGYYDILNGYTEKGYYFDY

SEQ ID NO: 2399 - protein, 109 aa, Artificial Sequence
  Synthetic
EIVMTQSPATLSVSPGERATLSCRASQSLSTNLAWYQQKPGQAPRLLIYDASTRATGIPARFSGSGSGTEFTLTISSLQSEDFALYYCQQYNDWPPEYTFGLGTKLEIK

SEQ ID NO: 2400 - protein, 11 aa, Artificial Sequence
  Synthetic
QQYNDWPPEYT

SEQ ID NO: 2401 - protein, 122 aa, Artificial Sequence
  Synthetic
QVQLVQSGAEVKKPGASVKVSCKAVGYTFTSQYIHWVRQAPGQGLEWMGIINPEVGSITYAQEFQGRVIMTRDTSTSTVYMELSSLRSEDTAVYYCSRDQCFLPGGCGMDVWGQGTTVTVSS

SEQ ID NO: 2402 - protein, 15 aa, Artificial Sequence
  Synthetic
SRDQCFLPGGCGMDV

SEQ ID NO: 2403 - protein, 108 aa, Artificial Sequence
  Synthetic
EIVMTQSPATLSVSPGERATLSCRASQSVSSNLAWYQQRPGQAPRLLIYGASTRATDIPARFSGSGSGTEFTLTISSLQSEDFAVYYCQHYNKWPPWTFGQGTKVEIK

SEQ ID NO: 2404 - protein, 10 aa, Artificial Sequence
  Synthetic
QHYNKWPPWT

SEQ ID NO: 2405 - protein, 120 aa, Artificial Sequence; identical to SEQ ID NO: 93
  Synthetic

SEQ ID NO: 2406 - protein, 13 aa, Artificial Sequence
  Synthetic
ARDPMIVVVEMDY

SEQ ID NO: 2407 - protein, 112 aa, Artificial Sequence; identical to SEQ ID NO: 94
  Synthetic

SEQ ID NO: 2408 - protein, 9 aa, Artificial Sequence
  Synthetic
MQGSHWPYT

SEQ ID NO: 2409 - protein, 127 aa, Artificial Sequence
  Synthetic
QVQLVESGGGVVQPGRSLRLSCAASGFIFSHYGMHWVRQAPGKGLEWVAVILYDGSDQYYADSVKGRFTISRDNSKNTLFLEMNSLRLEDTAVYYCAKGGGQYCSHGNCYLNYFDYWGQGAPVTVSS

SEQ ID NO: 2410 - protein, 20 aa, Artificial Sequence
  Synthetic
AKGGGQYCSHGNCYLNYFDY

SEQ ID NO: 2411 - protein, 107 aa, Artificial Sequence; identical to SEQ ID NO: 122
  Synthetic

SEQ ID NO: 2412 - protein, 9 aa, Artificial Sequence
  Synthetic
QQYANLPTT

SEQ ID NO: 2413 - protein, 122 aa, Artificial Sequence; identical to SEQ ID NO: 99
  Synthetic

SEQ ID NO: 2414 - protein, 15 aa, Artificial Sequence
  Synthetic
ARGDCTSSSCYSLDY

SEQ ID NO: 2415 - protein, 107 aa, Artificial Sequence
  Synthetic
DIQMTQSPSSLSASVGDRVSITCRASQTINTHLSWYLQKPGEAPRLLVYAASTLHSGVPSRFSGSGSGTDFTLTISSLQPEDFATFYCQQTYRFPLTFGGGTRVENK

SEQ ID NO: 2416 - protein, 9 aa, Artificial Sequence
  Synthetic
QQTYRFPLT

SEQ ID NO: 2417 - protein, 122 aa, Artificial Sequence
  Synthetic
EVQLVESGGGLVQPGGSLRLSCSASGFTFSNYAMHWVRQAPGKGLEYVSSISSNGDITYYADSVKGRFTISRDNSKSTLFLQMSSLRAEDRAVYFCVKDKEETTMVTIFDYWGQGTLVTVSS

SEQ ID NO: 2418 - protein, 15 aa, Artificial Sequence
  Synthetic
VKDKEETTMVTIFDY

SEQ ID NO: 2419 - protein, 107 aa, Artificial Sequence
  Synthetic
DIQMTQSPSSLSASVGDRVTITCRASQSVNNYLNWYQQKPGKAPKLLIYTASSLQSGVPSRFSGSGSGTDYSLTINSLQPEDFATYYCQQSYSSHLTFGPGTSVDIK

SEQ ID NO: 2420 - protein, 9 aa, Artificial Sequence
  Synthetic
QQSYSSHLT

SEQ ID NO: 2421 - protein, 129 aa, Artificial Sequence
  Synthetic
EVQLLESGGGLVQPGGSLRLACVASGFTFSNYAMNWVRQAPGKGLEWVSAISGIYGGTYYADSVKGRFTISRDNSKNTLYLHMNSLRAEDTAVYFCAKGGGYNLNDRGDYYYDYYMDVWGKGTTVTVSS

SEQ ID NO: 2422 - protein, 22 aa, Artificial Sequence
  Synthetic
AKGGGYNLNDRGDYYYDYYMDV

SEQ ID NO: 2423 - protein, 107 aa, Artificial Sequence
  Synthetic
EIVLTQSPGTLSLSPGERATLSCRASQSISSNYLAWYQQKPGQAPRLVIYGASSRATGIPDRFSGSGSGTDFTLTISRLEPEDFAVYYCQQYGSSPSTFGQGTKVEI

SEQ ID NO: 2424 - protein, 9 aa, Artificial Sequence
  Synthetic
QQYGSSPST

SEQ ID NO: 2425 - protein, 120 aa, Artificial Sequence
  Synthetic
EVQLVESGGGLVKPGGSLRLSCAASGFIFSDYSMNWVRQAPGTGLEWVSSISSSSSYIYYADSARGRFTVSRDNAKNSLFLQMNSLRDEDTAVYYCTRDPYDDYSWFDPWGQGTLVTVSS

SEQ ID NO: 2426 - protein, 13 aa, Artificial Sequence
  Synthetic
TRDPYDDYSWFDP

SEQ ID NO: 2427 - protein, 107 aa, Artificial Sequence
  Synthetic
DIQMTQSPSSLSASVGDRVTITCRASQRIINYLNWYQQQPGKAPKLLIYGASTLQIGVPSRFSGSGSGTDFTLTISSLQPEDFATYYCQHSYSIPPAFGQGTKVEIK

SEQ ID NO: 2428 - protein, 9 aa, Artificial Sequence
  Synthetic
QHSYSIPPA

SEQ ID NO: 2429 - protein, 122 aa, Artificial Sequence
  Synthetic
QVQLVESGGGVVQPGNSLRLSCAASGFSFSTYGMHWVRQAPGKGLEWVAVISNDGSNRFYADSVKGRFTISRDNSKNTLFLQMNSLRPEDTAVYYCATEVHTPLVIGCPDYWGLGTLVIVSS

SEQ ID NO: 2430 - protein, 15 aa, Artificial Sequence
  Synthetic
ATEVHTPLVIGCPDY

SEQ ID NO: 2431 - protein, 109 aa, Artificial Sequence
  Synthetic
EIVMTQSPATLSVSPGERATLSCRASQPVNTNLAWYQQRPGQAPRLLFYGASTRATGIPARFSGTGSGTEFTLTISGLQSEDFAIYYCQQYHIWPPEFTFGPGTRVDIK

SEQ ID NO: 2432 - protein, 11 aa, Artificial Sequence
  Synthetic
QQYHIWPPEFT

SEQ ID NO: 2433 - protein, 122 aa, Artificial Sequence
  Synthetic
QVQLVQSGAEVKKPGASVKVSCKASGYTFISYYIHWVRQAPGQGLEWMGIINPEAGSITYAQRFQGRVTMTSATSTSTVYMELNRLRSEDTAVYYCARGDLIIPARGYLDYWGQGTLVTVSP

SEQ ID NO: 2434 - protein, 15 aa, Artificial Sequence
  Synthetic
ARGDLIIPARGYLDY

SEQ ID NO: 2435 - protein, 108 aa, Artificial Sequence
  Synthetic
EIVLTQSPATLSLSPGERATLSCRASQSVGSYLAWYQQKSGQAPRLLIYDAINRATGIPARFSGSGSGTDFTLTISSLEPEDFALYFCQQRNNWPRVTFGRGTKLEIK

SEQ ID NO: 2436 - protein, 10 aa, Artificial Sequence
  Synthetic
QQRNNWPRVT

SEQ ID NO: 2437 - protein, 121 aa, Artificial Sequence
  Synthetic
QLQLQESGPGLVKPSETLSLTCTVSGGSLNRSYYYWGWIRQPPGKGLEWFGSIYYSGGTYYNPSLKSRVTISVDTSKNQFSLKVNSVTAADTAVYYCARGGSGSFFVFDIWGQGTLVTVSS

SEQ ID NO: 2438 - protein, 13 aa, Artificial Sequence
  Synthetic
ARGGSGSFFVFDI

SEQ ID NO: 2439 - protein, 108 aa, Artificial Sequence
  Synthetic
DIQMTQSPSSLSASVGDRVTITCQASQDISNHLNWYQQKPGKAPKLLIYDASSLETGVPSRFSGSGSGTDFTFTISSLQTEDFATYYCQQYDNLLPLTFGGGTKVEIK

SEQ ID NO: 2440 - protein, 10 aa, Artificial Sequence
  Synthetic
QQYDNLLPLT

SEQ ID NO: 2441 - protein, 130 aa, Artificial Sequence
  Synthetic
EVQLVQSGAEVKKPGESLKISCQGSGYSFSNYWITWVRQMPGKGPEWMGRIDPTDSYTHYSPSFQGHVTMSVDKSINTAYLQWSSLQAADTAIYHCARIASFRSSGSESYYPTQNFMDVWGKGTTVTVSS

SEQ ID NO: 2442 - protein, 23 aa, Artificial Sequence
  Synthetic
ARIASFRSSGSESYYPTQNFMDV

SEQ ID NO: 2443 - protein, 108 aa, Artificial Sequence
  Synthetic
EIVLTQSPGTLSLSPGERATLSCRASQSVSNSYLAWYQRKPGQAPRLLIYGASNRATGIPDRFSGSGSGTDFTLTISRLEPEDFAVYYCQQYGSLLLTFGGGTKVEIK

SEQ ID NO: 2444 - protein, 9 aa, Artificial Sequence
  Synthetic
QQYGSLLLT

SEQ ID NO: 2445 - protein, 123 aa, Artificial Sequence
  Synthetic
QVQLVESGGGVVQPGRSLRLSCVGSEFTFSRSGFHWVRQAPGKGLEWVAVISFDGSFIYYSDSVKGRFTISRDNSKNTLYLQMNSLRAEDTAVYYCAKDSSFGSNWYYYFDYWGQGTLVTVSS

SEQ ID NO: 2446 - protein, 16 aa, Artificial Sequence
  Synthetic
AKDSSFGSNWYYYFDY

SEQ ID NO: 2447 - protein, 106 aa, Artificial Sequence
  Synthetic
AIQLTQSPSSLSASVGDRVTITCRASQDISSALAWYQQKPGKAPNLLIYDASSLESGVPSRFSGSGSGTDFTLTISSLQPEDFATYYCQQFNSYPTFGQGTKVEIK

SEQ ID NO: 2448 - protein, 8 aa, Artificial Sequence
  Synthetic
QQFNSYPT

SEQ ID NO: 2449 - protein, 118 aa, Artificial Sequence; identical to SEQ ID NO: 107
  Synthetic

SEQ ID NO: 2450 - protein, 11 aa, Artificial Sequence
  Synthetic
TINTQWDLVPR

SEQ ID NO: 2451 - protein, 108 aa, Artificial Sequence; identical to SEQ ID NO: 108
  Synthetic

SEQ ID NO: 2452 - protein, 9 aa, Artificial Sequence
  Synthetic
QQYGSSLYT

SEQ ID NO: 2453 - protein, 127 aa, Artificial Sequence; identical to SEQ ID NO: 119
  Synthetic

SEQ ID NO: 2454 - protein, 20 aa, Artificial Sequence
  Synthetic
AKAGGPYYYDTSGSFWYFDY

SEQ ID NO: 2455 - protein, 103 aa, Artificial Sequence
  Synthetic
DIQMTQSPSSLSASVGDRVTITCRASQTISSYLNWYQQKSGKAPELLVYDASNLESGVPSRFSGSGSGTDFTLTISSLQPEDFATYYCQQSYSFGPGTKVHIK

SEQ ID NO: 2456 - protein, 5 aa, Artificial Sequence
  Synthetic
QQSYS

SEQ ID NO: 2457 - protein, 127 aa, Artificial Sequence; identical to SEQ ID NO: 129
  Synthetic

SEQ ID NO: 2458 - protein, 20 aa, Artificial Sequence
  Synthetic
ARDFESRTWDPPKYYYALDV

SEQ ID NO: 2459 - protein, 108 aa, Artificial Sequence; identical to SEQ ID NO: 130
  Synthetic

SEQ ID NO: 2460 - protein, 10 aa, Artificial Sequence
  Synthetic
QQTYTTPTWT

SEQ ID NO: 2461 - protein, 125 aa, Artificial Sequence
  Synthetic
QVQLQQSGLGLVKPSQSLSLTCVISGDSVSSNSAAWNWIRQSPSRGLEWLGRTYYRSKWYSEFAVSVKSRMTINPDTSRNQFSLQLNSVTPEDTAVYYCARGVDTTMITGAFFDYWGQGTLVTVS

SEQ ID NO: 2462 - protein, 16 aa, Artificial Sequence
  Synthetic
ARGVDTTMITGAFFDY

SEQ ID NO: 2463 - protein, 109 aa, Artificial Sequence
  Synthetic
EIVMTQSPATLSVSPGERLTLSCRASQSVNSNLAWYQQKPGQGPRLLIFGASTRATGIPARFSGSGSGTEFTLTISSLQSEDFAVYYCQQYHNWPPGLTFGGGTKVEIK

SEQ ID NO: 2464 - protein, 11 aa, Artificial Sequence
  Synthetic
QQYHNWPPGLT

SEQ ID NO: 2465 - protein, 123 aa, Artificial Sequence
  Synthetic
QVQLVQSGPEVKKPGDSVKVSCKASGYTFSSHYLHWVRQAPGQGLEWMGIMNGIGGSTIYAQKFQGRVTMTSDTSTSTAYMELSSLTFEDTAVYYCTRNSADDKVWGSPYDYWGQGTLVTVSS

SEQ ID NO: 2466 - protein, 16 aa, Artificial Sequence
  Synthetic
TRNSADDKVWGSPYDY

SEQ ID NO: 2467 - protein, 107 aa, Artificial Sequence
  Synthetic
EIVMTQSPATLSVSPGEKATLSCRTSQSVRGDLAWYQQKPGQAPRLLMYGAATRATGIPARFSGSGSGTEFTLTINSLQPEDFAVYFCQQYNYWPPSFGQGTRVEIK

SEQ ID NO: 2468 - protein, 9 aa, Artificial Sequence
  Synthetic
QQYNYWPPS

SEQ ID NO: 2469 - protein, 118 aa, Artificial Sequence; identical to SEQ ID NO: 89
  Synthetic

SEQ ID NO: 2470 - protein, 12 aa, Artificial Sequence
  Synthetic
ARESGSYGTFDY

SEQ ID NO: 2471 - protein, 108 aa, Artificial Sequence; identical to SEQ ID NO: 90
  Synthetic

SEQ ID NO: 2472 - protein, 9 aa, Artificial Sequence
  Synthetic
QQYAYTIWT

SEQ ID NO: 2473 - protein, 130 aa, Artificial Sequence
  Synthetic
EVQLVQSGAEVKKPGESLKISCKGSGYYFTRQWIGWVRQMPGKGLEWMGIIYPGDSDTRYSPSFQGQVTISADKSISTAYLQWSSLKASDTAMYYCARGGWDPAEYSSSGGGGLDAFDIWGQGTKVTVSS

SEQ ID NO: 2474 - protein, 23 aa, Artificial Sequence
  Synthetic
ARGGWDPAEYSSSGGGGLDAFDI

SEQ ID NO: 2475 - protein, 107 aa, Artificial Sequence
  Synthetic
EIVLTQSPATLSLSPGERATLSCRASQSVSSYLAWYQQRPGRAPRLLIYDASNRATGIPGRFSGSGSGTDFSLTISSLEPEDFAVYYCQQRSSWPLTFGQGTRLDIK

SEQ ID NO: 2476 - protein, 9 aa, Artificial Sequence
  Synthetic
QQRSSWPLT

SEQ ID NO: 2477 - protein, 117 aa, Artificial Sequence
  Synthetic
QVQLQESGPGLVKPSETLSLTCSVSGDSISGYYCNWIRQPPGKGLEWIGYIYYSGTTNYNPSLKSRVTISVDTSKNQISLKLSSVTAADAAVYYCAREGVRGELRDWGQGILVTVSS

SEQ ID NO: 2478 - protein, 11 aa, Artificial Sequence
  Synthetic
AREGVRGELRD

SEQ ID NO: 2479 - protein, 109 aa, Artificial Sequence
  Synthetic
EIVLTQSPGTLSLSPGERATLSCRASQSLPSKNLAWYQQKPGQPPRLLIYGASNRATDIPDRFSGSGSGTVFTLTISRLEPEDFAVYYCQQYGSSQGYTFGQGTKLEIK

SEQ ID NO: 2480 - protein, 10 aa, Artificial Sequence
  Synthetic
QQYGSSQGYT

SEQ ID NO: 2481 - protein, 120 aa, Artificial Sequence
  Synthetic
EVQLVESGGGLVQPGGSLRLSCAASGFTFSTYTIHWVRQAPGKGLEDVSAISSDGDITYYADSVKGRVTISRDNSKNTLYLQMRSLRAEDTAVYYCVKDYGGYIDAFDIWGQGTMVTVSS

SEQ ID NO: 2482 - protein, 13 aa, Artificial Sequence
  Synthetic
VKDYGGYIDAFDI

SEQ ID NO: 2483 - protein, 107 aa, Artificial Sequence
  Synthetic
DIQMTQSPSSLSASVGDRVTITCRASQIITTYLNWYQQKPGKAPNLLIYAASSLQSGVPSRFSGSGSGTDFTLTISSLQPEDFATYYCQQSYTTPYTFGQGTKLEIK

SEQ ID NO: 2484 - protein, 9 aa, Artificial Sequence
  Synthetic
QQSYTTPYT

SEQ ID NO: 2485 - protein, 127 aa, Artificial Sequence; identical to SEQ ID NO: 115
  Synthetic

SEQ ID NO: 2486 - protein, 20 aa, Artificial Sequence
  Synthetic
GRIAPPGRGSYYPTQNYMDV

SEQ ID NO: 2487 - protein, 108 aa, Artificial Sequence; identical to SEQ ID NO: 116
  Synthetic

SEQ ID NO: 2488 - protein, 9 aa, Artificial Sequence
  Synthetic
QQYGSLLLT

SEQ ID NO: 2489 - protein, 120 aa, Artificial Sequence
  Synthetic
QVQLVESGGGVVQPGKSLRLSCTASGFTFRNYGMHWVRQAPGKGLEWVAVIWYDGSNKYYADSVKGRFTISRDNSKNTVYLQMNSLRAEDTALYYCARDPTVTEFRLDYWGQGALVTVSS

SEQ ID NO: 2490 - protein, 13 aa, Artificial Sequence
  Synthetic
ARDPTVTEFRLDY

SEQ ID NO: 2491 - protein, 106 aa, Artificial Sequence
  Synthetic
DIQMTQSPSSLSASVGDRVTITCQASQDISNYLNWYQHKPGKAPKLLIYDASSLETGVPSRFSGSGSGTDFTFTISSLQPEDIATYYCQHYDILPLFGPGTKVDIK

SEQ ID NO: 2492 - protein, 8 aa, Artificial Sequence
  Synthetic
QHYDILPL

SEQ ID NO: 2493 - protein, 121 aa, Artificial Sequence
  Synthetic
QVQLVQSGAEVKKPGSSVKVSCKASGDTFSNYAISWVRQAPGQGLEWMGGIIVAFGTINYAQKFQGRVTITTDESTNTAYMELSSLRSADTAVYYCARAGVAYGDYVPDYWGQGTLVTVSS

SEQ ID NO: 2494 - protein, 14 aa, Artificial Sequence
  Synthetic
ARAGVAYGDYVPDY

SEQ ID NO: 2495 - protein, 108 aa, Artificial Sequence
  Synthetic
EIVLTQSPGTLSLSPGERATLSCRASQSVSSNYLAWYQQKRGQAPRLLIYAASSRATGIPDRFSGSGSGTDFTLTISRLEPEDCAVYYCQQYGSPPWTFGQGTKVEIK

SEQ ID NO: 2496 - protein, 9 aa, Artificial Sequence
  Synthetic
QQYGSPPWT

SEQ ID NO: 2497 - protein, 123 aa, Artificial Sequence
  Synthetic
EVQLVESGGGLVQPGGSLRLSCAASGLNVSSNYMSWVRQAPGKGLDWVSVFFPDGSANYAESVKGRFTLSRDNSKNTLYLQLNSLRAEDTAVYYCARDRRLGLPFYYFYMDVWGKGTTVTVSS

SEQ ID NO: 2498 - protein, 17 aa, Artificial Sequence
  Synthetic
ARDRRLGLPFYYFYMDV

SEQ ID NO: 2499 - protein, 109 aa, Artificial Sequence
  Synthetic
EIVLTQSPGTLSLSPGERATLSCRASQSVSSSYLAWYQQKPGQAPRLLIYGASSRATGIPDRFSGSGSGTDFTLTISRLEPEDFAVYYCQQYGDSFSITFGQGTRLEIK

SEQ ID NO: 2500 - protein, 10 aa, Artificial Sequence
  Synthetic
QQYGDSFSIT

SEQ ID NO: 2501 - protein, 118 aa, Artificial Sequence
  Synthetic
QVQLVQSGAEMKKPGSSVKVSCKASGGTFNTYSIGWVRQAPGQGLEWMGQIIPIFDTPKYAQKFQGRVTISADESTTTAYMEVTSLRFDDTAMYYCTLNTQWDLVPRWGQGTLVIVSS

SEQ ID NO: 2502 - protein, 11 aa, Artificial Sequence
  Synthetic
TLNTQWDLVPR

SEQ ID NO: 2503 - protein, 114 aa, Artificial Sequence
  Synthetic
  misc_feature (9)..(10): Xaa can be any naturally occurring amino acid
EIVLTQSPXXLSLSPGEGATLSCRASQSVNSNYLAWYQQRPGQAPRLLIYGASSRATGIPDRFSGSGSGTDFTLTISTLEPEDFAVYYCQHYGGSLNTFGQGTTFGQGTKLEIK

SEQ ID NO: 2504 - protein, 15 aa, Artificial Sequence
  Synthetic
QHYGGSLNTFGQGTT

SEQ ID NO: 2505 - protein, 121 aa, Artificial Sequence
  Synthetic
EVQLLESGGGLVQPGGSLRLSCAASGFTFSSYAMSWVRQAPGKGLEWVSAITGSGGGTYYADSVKGRFTISRHNSKNTLYLQMNSLRAEDTAVYYCAKGIGAVGPGFFDYWGQGTLVTVSS

SEQ ID NO: 2506 - protein, 14 aa, Artificial Sequence
  Synthetic
AKGIGAVGPGFFDY

SEQ ID NO: 2507 - protein, 108 aa, Artificial Sequence
  Synthetic
DIQMTQSPSSLSASVGDRVTITCRASQGISNSLAWYQQKPGKAPNLLLYSASTLESGVPSRFSGSGSGTDFTLTISSLQPEDFATYYCQQYYSTPPLTFGGGTKVEIK

SEQ ID NO: 2508 - protein, 10 aa, Artificial Sequence
  Synthetic
QQYYSTPPLT

SEQ ID NO: 2509 - protein, 118 aa, Artificial Sequence
  Synthetic
EVQLVETGGGLIQPGGSLRLSCAASGFIVSSNYMSWVRQAPGKGLEWVSLIYSGGSTYYADSVKGRFTISRDNSKNTLYLQMNSLRAEDTGVYYCAREAVAGRIVPVWGQGTLVTVSS

SEQ ID NO: 2510 - protein, 12 aa, Artificial Sequence
  Synthetic
AREAVAGRIVPV

SEQ ID NO: 2511 - protein, 107 aa, Artificial Sequence
  Synthetic
  misc_feature (9)..(10): Xaa can be any naturally occurring amino acid
DIQMTQSPXXLSASVGDRVTITCQASQDVRNYLNWYQQKPGRAPKVLFYDASNLETGVPSRFSGSGSGTDFTFTISSLQPEDIATYYCQQYDNLPITFGQGTRLDIK

SEQ ID NO: 2512 - protein, 9 aa, Artificial Sequence
  Synthetic
QQYDNLPIT

SEQ ID NO: 2513 - protein, 128 aa, Artificial Sequence
  Synthetic
QVQLQQWGAGLLKPSETLSLACAVYGGSFSAYYWSWIRQPPGKGLEWIGEISHSGSTYYNPSLKSRVNISVDTSKNQVSLNLSSVTAADTAVYYCARSESNAIFGAVSWWSTYYMDAWGKGTTVTVSS

SEQ ID NO: 2514 - protein, 22 aa, Artificial Sequence
  Synthetic
ARSESNAIFGAVSWWSTYYMDA

SEQ ID NO: 2515 - protein, 108 aa, Artificial Sequence
  Synthetic
EIVLTQSPVSLSLSPGERATLSCRASQSVSSNYLAWHQQKPGQAPRLVIYGASSRATGIPDRLSGSGSGTDFTLTISRLEPEDFAVYYCQQYGSSPITFGQGTRLEIK

SEQ ID NO: 2516 - protein, 9 aa, Artificial Sequence
  Synthetic
QQYGSSPIT

SEQ ID NO: 2517 - protein, 143 aa, Artificial Sequence
  Synthetic
EVQLLESGGGLVPPGGSLRLSCAASGFTFSPYAMSWVRQTPRKGLEWVSGISGSGDGPYPKWVSGLSGDGGTTYYADSVKGRFAISRDNSRSTLFLQMNSLSAEDTAIYYCAKEPRGYYDRSGDYYILPPDFWGQGTLVTVSS

SEQ ID NO: 2518 - protein, 21 aa, Artificial Sequence
  Synthetic
AKEPRGYYDRSGDYYILPPDF

SEQ ID NO: 2519 - protein, 107 aa, Artificial Sequence
  Synthetic
DIQMTQSPSSLSASVGDRVTITCRASQDIRSDLGWYQQTPGKAPKRLIYAASNLESGVPSRFSGSGSGTEFALTISSLQPEDFATYYCLQHNSYPLTFGQGTRLEIK

SEQ ID NO: 2520 - protein, 9 aa, Artificial Sequence
  Synthetic
LQHNSYPLT

SEQ ID NO: 2521 - protein, 117 aa, Artificial Sequence
  Synthetic
QVQLVQSGAEVKKPGSSVRVSCKASGGSFNTYIITWVRQAPGHGLEWMGGIIPLFGTPNYAQKFQGRVTVSADESTSTAYMELSSLRSDDTAVYYCVINTQWDLLLYWGQGTLVTVS

SEQ ID NO: 2522 - protein, 11 aa, Artificial Sequence
  Synthetic
VINTQWDLLLY

SEQ ID NO: 2523 - protein, 109 aa, Artificial Sequence
  Synthetic
EIVLTQSPGTLSMSPGERATLSCRASQTISSSYLAWYQQKRGQSPRLLIYGATSRATGVPDRFSGSGSGTDFTLTISGLEPEDFAVYYCQKYDISPRGTFGQGTKVEIK

SEQ ID NO: 2524 - protein, 10 aa, Artificial Sequence
  Synthetic
QKYDISPRGT

SEQ ID NO: 2525 - protein, 119 aa, Artificial Sequence
  Synthetic
QVQLQESGPGLVKPSQTLSLTCSVSGGSISSGGHYWSWTRHHPGKGLEWIGYIFYSGSTYYNPSLRSRVTMSVDTSKNQFSLKLSSVTAADTAVYYCARVVAFGIFDYWGQGTLVTVSS

SEQ ID NO: 2526 - protein, 11 aa, Artificial Sequence
  Synthetic
ARVVAFGIFDY

SEQ ID NO: 2527 - protein, 109 aa, Artificial Sequence
  Synthetic
DIQMTQSPVSLSASIGDRVTITCQASQDINNYLNWYQQKPGKGPKLLIYDASNLEAGVPSRFSGSGSGTDFTFTISSLQPEDIGTYYCQQYDNLPPRCSFGQGTTLEIK

SEQ ID NO: 2528 - protein, 11 aa, Artificial Sequence
  Synthetic
QQYDNLPPRCS

SEQ ID NO: 2529 - protein, 127 aa, Artificial Sequence; identical to SEQ ID NO: 123
  Synthetic

SEQ ID NO: 2530 - protein, 20 aa, Artificial Sequence
  Synthetic
ARRDCSTTSCYDEVLYRLVD

SEQ ID NO: 2531 - protein, 108 aa, Artificial Sequence; identical to SEQ ID NO: 124
  Synthetic

SEQ ID NO: 2532 - protein, 9 aa, Artificial Sequence
  Synthetic
QQYGNSPRT

SEQ ID NO: 2533 - protein, 117 aa, Artificial Sequence; identical to SEQ ID NO: 83
  Synthetic

SEQ ID NO: 2534 - protein, 11 aa, Artificial Sequence
  Synthetic
ARDLIVLGVDV

SEQ ID NO: 2535 - protein, 108 aa, Artificial Sequence
  Synthetic
DIQLTQSPSFLSASVGDRVTITCRASQGISNYLAWYQQKPGKAPKLLIYAASTLQSGVPSRFSGSGSGTEFTLTISSLQPEDFATYYCQLLNSYPMCSFGQGTKVEIK

SEQ ID NO: 2536 - protein, 10 aa, Artificial Sequence
  Synthetic
QLLNSYPMCS

SEQ ID NO: 2537 - protein, 122 aa, Artificial Sequence
  Synthetic
EVQLVQSGAEVKKPGESLTISCKGSGYDFSNYWINWVRQMPGKGLEWMGRIDPGDSYTNNSPSFQGRVTISADKSIRTTYLQWSSLKASDTAMYYCARGHYHYYSRGAFDFWGQGTMVTVSS

SEQ ID NO: 2538 - protein, 15 aa, Artificial Sequence
  Synthetic
ARGHYHYYSRGAFDF

SEQ ID NO: 2539 - protein, 107 aa, Artificial Sequence
  Synthetic
DIQMTQSPSSLSASVGDRVTISCQASQDISNSLNWYQQKPGKAPKLLINDASNLETGVPSRFSGGGSGTDFTFTISNLQPEDIATYYCQQYDSLFRSFGQGTKLEIK

SEQ ID NO: 2540 - protein, 9 aa, Artificial Sequence
  Synthetic
QQYDSLFRS

SEQ ID NO: 2541 - protein, 117 aa, Artificial Sequence
  Synthetic
EVQLVESGGGLIQPGGSLRLSCAASGFIVSRNYMTWVRQAPGKGLEWVSIIYPGGSTFYADSVKGRFTISRENSQNTLFLQLNSLRAEDTAVYYCTRDLVTNGIDCWGQGTLVTVSS

SEQ ID NO: 2542 - protein, 11 aa, Artificial Sequence
  Synthetic
TRDLVTNGIDC

SEQ ID NO: 2543 - protein, 108 aa, Artificial Sequence
  Synthetic
DIQLTQSPVSLSASVGDRVTITCRASQGISTHLAWYQQKAGEAPKLLIYAASTLQSGVPSRFSGSGSGTEFTLTISSLQPEDFATYYCQLLNSYPLCSFGQGTKLEIK

SEQ ID NO: 2544 - protein, 10 aa, Artificial Sequence
  Synthetic
QLLNSYPLCS

SEQ ID NO: 2545 - protein, 125 aa, Artificial Sequence
  Synthetic
QVQLVESGGGVVQPGRSLRLSCAASGFTFSRYGMHWVRQAPGKGLEWVAVISYDGNYEEYGDSVRGRFIISRDNSKNMMYLQMNNMRAEDTAMYFCAKGGFYGIRGSYRPTFDYWGQGTLVTVSS

SEQ ID NO: 2546 - protein, 18 aa, Artificial Sequence
  Synthetic
AKGGFYGIRGSYRPTFDY

SEQ ID NO: 2547 - protein, 109 aa, Artificial Sequence
  Synthetic
DIQMTQSPSSLSASVGDRVTITCQASHDISDSLNWYLQKPGKAPKLLISDASNLETGVPSRFSGSGSGTEFTFTISSLQPEDVGTYYCQQYDSLPPLCTFGQGTKLEIK

SEQ ID NO: 2548 - protein, 11 aa, Artificial Sequence
  Synthetic
QQYDSLPPLCT

SEQ ID NO: 2549 - protein, 124 aa, Artificial Sequence
  Synthetic
QVQLVESGGGVVQPGRSLRLSCAASGFTFRSHAMHWVRQAPGKGLECVAVIWNDGSKKHYADSVKGRFTISRDNSNNTLYLQMNSLTVEDTAVYYCAREGIAATPSASDAFDIWGQGTMVTVSS

SEQ ID NO: 2550 - protein, 17 aa, Artificial Sequence
  Synthetic
AREGIAATPSASDAFDI

SEQ ID NO: 2551 - protein, 107 aa, Artificial Sequence
  Synthetic
  misc_feature (9)..(10): Xaa can be any naturally occurring amino acid
DIQMTQSPXXLSASVGDRVTITCRARQSISSFLNWYQQKPGKPPNLLIYAASALQSGVPSRFSGSGSGTEFTLTISSLQPEDFATYYCQQSYSTPYTFGQGTNLEIK

SEQ ID NO: 2552 - protein, 9 aa, Artificial Sequence
  Synthetic
QQSYSTPYT

SEQ ID NO: 2553 - protein, 129 aa, Artificial Sequence
  Synthetic
EVQLVQSGAEVKKPGESLKISCKGSGYSFNFFAITWVRQMPGKGLEWMGVIDPGDSYINYSPSFEGHVSISADKTISTAYLQWTSLKASDTAVYFCARHERSYYDRSGYYERRTLNDYWGQGTLVTVSS

SEQ ID NO: 2554 - protein, 22 aa, Artificial Sequence
  Synthetic
ARHERSYYDRSGYYERRTLNDY

SEQ ID NO: 2555 - protein, 108 aa, Artificial Sequence
  Synthetic
EIVLTQSPGTLSLSPGERATLSCRASQSVSGNYLTWYQQKPGQAPRLLMSGPSSRATGIPDRFSGSGSGTDFTLTISRLEPEDFAVYYCQQYGSSPYTFGQGTKLEIK

SEQ ID NO: 2556 - protein, 9 aa, Artificial Sequence
  Synthetic
QQYGSSPYT

SEQ ID NO: 2557 - protein, 127 aa, Artificial Sequence; identical to SEQ ID NO: 131
  Synthetic

SEQ ID NO: 2558 - protein, 20 aa, Artificial Sequence
  Synthetic
ARLSWSPPTRTTDEKNWFDP

SEQ ID NO: 2559 - protein, 107 aa, Artificial Sequence
  Synthetic
DIQLTQSPSFLSASAGDRVTITCRASQGISSYLAWYQQKPGKAPKVLIYAASTLQSGVPSRFSGSGSGTEFTLTISSLQPEDCATYYCQQFNSDPLTFGGGTKVEIK

SEQ ID NO: 2560 - protein, 9 aa, Artificial Sequence
  Synthetic
QQFNSDPLT

SEQ ID NO: 2561 - protein, 134 aa, Artificial Sequence
  Synthetic
EVQLVESGGGLVQPGGSLRLSCAASGFSLDTYSMNWVRQAPGKGLEWISYVTAGSNTMSYADSVKGRFTISRDNAKNSLYLQMNNLRDDDTAVYYCARDFGSDGYCGGDCYSSGYYYYYGMDVWGQGTTVTVSS

SEQ ID NO: 2562 - protein, 27 aa, Artificial Sequence
  Synthetic
ARDFGSDGYCGGDCYSSGYYYYYGMDV

SEQ ID NO: 2563 - protein, 109 aa, Artificial Sequence
  Synthetic
EIVLTQSPATLSLYPGERATLSCRASQSISSHLAWYQQKPGQTPRLLIYDASIRAPGIPARFSGSGSGTDFTLTIRSLEPEDFAVYYCQQRVNWPPRFTFGPGTKVDIK

SEQ ID NO: 2564 - protein, 11 aa, Artificial Sequence
  Synthetic
QQRVNWPPRFT

SEQ ID NO: 2565 - protein, 118 aa, Artificial Sequence
  Synthetic
QVQLQESGPGLVKPSQTLSLTCSVSGVSITSGGHYWSWIRQHPGKGLEWIGYIFYSGSTYYSASLKSRLTISVDTSKNQFSLRLTSVTAADTAVYFCARVAAGSFDYWGQGTLVTVSS

SEQ ID NO: 2566 - protein, 10 aa, Artificial Sequence
  Synthetic
ARVAAGSFDY

SEQ ID NO: 2567 - protein, 109 aa, Artificial Sequence
  Synthetic
DIQMTQSPSSLSASVGDRVTITCQASQDISNYLNWYQQKPGKAPKLLIFDASNLESGVPSRFSGSGSGTDFTFTISSLQPEDIATYFCQQYDNLPPMSTFGQGTKVEIK

SEQ ID NO: 2568 - protein, 11 aa, Artificial Sequence
  Synthetic
QQYDNLPPMST

SEQ ID NO: 2569 - protein, 118 aa, Artificial Sequence
  Synthetic
QVQLQESGPGLVKASQTLSLTCTVSGASISSGGHFWSWIRQHPGKGLEWIGYGFYSGSTYYNPSLKSRVIISVDTSKNQFSLKLSSVTAADTAVYYCARCAAGSLDYWGQGTLITVSS

SEQ ID NO: 2570 - protein, 10 aa, Artificial Sequence
  Synthetic
ARCAAGSLDY

SEQ ID NO: 2571 - protein, 107 aa, Artificial Sequence
  Synthetic
DIQMTQSPVSLSASVGDRVTITCQASQDINNYVNWYQQKPGKAPKLLIYDASNLEAGVPPRFSGSGSGTDFTFTISSLQPEDLATYYCQQYDHVSCSFGQGTKVEMK

SEQ ID NO: 2572 - protein, 9 aa, Artificial Sequence
  Synthetic
QQYDHVSCS

SEQ ID NO: 2573 - protein, 126 aa, Artificial Sequence
  Synthetic
QVQLVESGGGVVQPGRSLRLSCVASGFTFRDHVMHWVRRLPGKGLEWVAVIWHDGTKEYYGENVKGRFTISRDNAKNTLYLQMNSLRAEDMAVYYCARDGAFGIRYPYYFYGMDVWGQGTTVTVSS

SEQ ID NO: 2574 - protein, 19 aa, Artificial Sequence
  Synthetic
ARDGAFGIRYPYYFYGMDV

SEQ ID NO: 2575 - protein, 111 aa, Artificial Sequence
  Synthetic
  misc_feature (9)..(9): Xaa can be any naturally occurring amino acid
DIVMTQTPXSLSVTPGQPASISCKSSQSLLHTDGKTYLYWHLQKPGQSPQVLIYEVSSRFSGVPDRFSGSGSGTDFTLKIDRVEAEDVGVYYCMQGIYLPPTFGQGTKVEI

SEQ ID NO: 2576 - protein, 9 aa, Artificial Sequence
  Synthetic
MQGIYLPPT

SEQ ID NO: 2577 - protein, 117 aa, Artificial Sequence; identical to SEQ ID NO: 81
  Synthetic

SEQ ID NO: 2578 - protein, 11 aa, Artificial Sequence
  Synthetic
VRDFGEFYFDY

SEQ ID NO: 2579 - protein, 107 aa, Artificial Sequence
  Synthetic
EIVMTQSPVSLSVSPGERATLSCRASQSLSSNLAWYQQKPGQAPRLLIFGVSTRATGIPARFSGSGSGTEFTLTISSLQSEDFAVYYCQQYYSGPRTFGQGTKVEIK

SEQ ID NO: 2580 - protein, 9 aa, Artificial Sequence
  Synthetic
QQYYSGPRT

SEQ ID NO: 2581 - protein, 118 aa, Artificial Sequence
  Synthetic
QVQLVQSGAEVKKPGASVNVSCKAFGYSFTGHYMHWVRQAPGQGLEWMGWISPNSGGRNHAQQFQGRVSMTWDTSISTAYMELNRLRSDDTAIYFCTRGYSGYDFDYWGQGTLVTVSS

SEQ ID NO: 2582 - protein, 11 aa, Artificial Sequence
  Synthetic
TRGYSGYDFDY

SEQ ID NO: 2583 - protein, 108 aa, Artificial Sequence
  Synthetic
  misc_feature (9)..(10): Xaa can be any naturally occurring amino acid
DIQMTQSPXXLSASVGDRVTITCRASQGVGTYLNWYQQKPGKAPKLLISGASTLQSGVPSRFSGRGSGTDFTLTISALQPEDFATYYCQQTSNTLSITFGQGTRLEIK

SEQ ID NO: 2584 - protein, 10 aa, Artificial Sequence
  Synthetic
QQTSNTLSIT

SEQ ID NO: 2585 - protein, 117 aa, Artificial Sequence; identical to SEQ ID NO: 2393
  Synthetic

SEQ ID NO: 2586 - protein, 11 aa, Artificial Sequence
  Synthetic
VRDFGEFYFDY

SEQ ID NO: 2587 - protein, 107 aa, Artificial Sequence
  Synthetic
  misc_feature (9)..(10): Xaa can be any naturally occurring amino acid
EIVMTQSPXXLSVSPGERATLSCRASQSLSSNLAWYQQKPGQAPRLLIFGASTRATGIPARFSGSGSGTEFTLTISSLQSEDFAVYYCQQYYSGPRTFGQGTKVEIK

SEQ ID NO: 2588 - protein, 9 aa, Artificial Sequence
  Synthetic
QQYYSGPRT

SEQ ID NO: 2589 - protein, 121 aa, Artificial Sequence
  Synthetic
QVQLVESGGGVVQPGRSLRLSCTASGFSFSDHGMFWVRQAPGKGLEWVTIISRDGSSKFYADSVKGRFTISRDNSKNTLYLQMDSLRPEDTALYYCARDQLTLMVSFPDYWGQGTLVTVSS

SEQ ID NO: 2590 - protein, 14 aa, Artificial Sequence
  Synthetic
ARDQLTLMVSFPDY

SEQ ID NO: 2591 - protein, 108 aa, Artificial Sequence
  Synthetic
DIQMTQSPVSLSASVGDRVTITCRASQTISGYLNWYQHKPGEAPKLLVYAASSLQSGVPSRFSGSGSGTDFTLTISSLQPEDFATYYCQQSYSTPPWTFGQGTKVEIK

SEQ ID NO: 2592 - protein, 10 aa, Artificial Sequence
  Synthetic
QQSYSTPPWT

SEQ ID NO: 2593 - protein, 120 aa, Artificial Sequence
  Synthetic
QVQLQESGPGLVKPSQTLSLTCTVSGDSLSSGGYYWSWIRQHPGKGLEWIGYIHYSGAAYYNPSLKSRLTISVDTSKNQFSLNLASVTAADTAVYYCARDGMVAGVFEIWGQGTLVTVSS

SEQ ID NO: 2594 - protein, 12 aa, Artificial Sequence
  Synthetic
ARDGMVAGVFEI

SEQ ID NO: 2595 - protein, 107 aa, Artificial Sequence
  Synthetic
EIVLTQSPATLSLSPGERATLSCRASQSVSSYLAWYQQKPGQAPRLLIYDASYRATGIPARFSGNGSGSEFTLTISSVEPEDFAVYYCQQRSHWPPFTFGPGTKVDI

SEQ ID NO: 2596 - protein, 10 aa, Artificial Sequence
  Synthetic
QQRSHWPPFT

SEQ ID NO: 2597 - protein, 130 aa, Artificial Sequence
  Synthetic
QVQLVQSGAEVKKPGSSVKVSCKASGGTFTSYAFSWVRQAPGQGLEWMGGIIPIFGTTNYAQKFQGRVTITADESTSTAYMELSSLRSEDTAVYYCARPEGCGSRTSCTPGAYYYGMDVWGQGTTVIVSS

SEQ ID NO: 2598 - protein, 23 aa, Artificial Sequence
  Synthetic
ARPEGCGSRTSCTPGAYYYGMDV

SEQ ID NO: 2599 - protein, 109 aa, Artificial Sequence; identical to SEQ ID NO: 118
  Synthetic

SEQ ID NO: 2600 - protein, 11 aa, Artificial Sequence
  Synthetic
QQRNSWPPEYS

SEQ ID NO: 2601 - protein, 117 aa, Artificial Sequence
  Synthetic
QVQLQQWGAGLLKPSETLSLTCAVYGGSFSSYYWSWIRQPPGKGLEWIGEISQRGSTNYNPSLKSRVTISIDVPKNQVSLKLTSVTAADTAVYFCAGWSRPSTFDYWGQGTLVTVSS

SEQ ID NO: 2602 - protein, 11 aa, Artificial Sequence
  Synthetic
AGWSRPSTFDY

SEQ ID NO: 2603 - protein, 106 aa, Artificial Sequence
  Synthetic
DIQMTQSPVSLSASVGDRVTITCQASQDINKYLNWYQQKPGQAPKLLIYDVSNLETGVPSRFSGGGSGTDFSFTISSLQPEDIATYYCQQYDNLPPTFGQGTKLEI

SEQ ID NO: 2604 - protein, 9 aa, Artificial Sequence
  Synthetic
QQYDNLPPT

SEQ ID NO: 2605 - protein, 121 aa, Artificial Sequence
  Synthetic
EVQLVESGGGLVQPGGSLRLSCSASGFSFSNYAMHWVRQAPGKGLEYVSAISSDGGSTDYADSVKGRFTISRDNSKNTLYLQMSSLRAEDTAVYYCVKDSITMIVVVLDYWGQGTLVTVSS

SEQ ID NO: 2606 - protein, 14 aa, Artificial Sequence
  Synthetic
VKDSITMIVVVLDY

SEQ ID NO: 2607 - protein, 107 aa, Artificial Sequence
  Synthetic
  misc_feature (10)..(10): Xaa can be any naturally occurring amino acid
DIQMTQSPSXLPASVGDRVTITCRARQSISSYLNWYQQKPGKAPKLLIYAASSLQSGVPSRFSGSGSGTDFTLTISSLQPEDFATYYCQQSYSSPPTFGQGTKVEIK

SEQ ID NO: 2608 - protein, 9 aa, Artificial Sequence
  Synthetic
QQSYSSPPT

SEQ ID NO: 2609 - protein, 122 aa, Artificial Sequence
  Synthetic
QVQLQESGPGLVKPSQTLSLTCTVSGGSISGGSGYYWSWVRQHPGKGLEWIGYIYYSGSASYNPSLQSRVTMSVDTSKNQVSLRLRSVTVADTAIYYCARDFGGNANYFAYWGQGILVTVSS

SEQ ID NO: 2610 - protein, 13 aa, Artificial Sequence
  Synthetic
ARDFGGNANYFAY

SEQ ID NO: 2611 - protein, 106 aa, Artificial Sequence
  Synthetic
DIQMTQSPSSLSASVGDRVTITCQASQDISNYLSWYQKKPGIAPKLLIYDASDLQTGVPSRFSGSGSGTDFTLTISSLQPEDIATYYCQQYDNLPLTFGPGTKVDF

SEQ ID NO: 2612 - protein, 9 aa, Artificial Sequence
  Synthetic
QQYDNLPLT

SEQ ID NO: 2613 - protein, 116 aa, Artificial Sequence
  Synthetic
QVQLQESGPGLVKPSGTLSLTCTVSGGSINSRNWWSWVRQPPGKGLEWIGEIFHSGSTNYNPSLESRVAISIDKSHNHFSLKLTSVTAADTAVYYCARANGILDFWGQGTLVAVSS

SEQ ID NO: 2614 - protein, 9 aa, Artificial Sequence
  Synthetic
ARANGILDF

SEQ ID NO: 2615 - protein, 106 aa, Artificial Sequence
  Synthetic
  misc_feature (9)..(10): Xaa can be any naturally occurring amino acid
DIQMTQSPXXLSASVGDRVTITCRASQGISNSLAWYQLKPGKAPKLLLYAASTLESGVPSRFSGSGSGTNFTLTISSLQPEDFASYCCQHYYSSPRTFGQGTKVEI

SEQ ID NO: 2616 - protein, 9 aa, Artificial Sequence
  Synthetic
QHYYSSPRT

SEQ ID NO: 2617 - protein, 119 aa, Artificial Sequence
  Synthetic
QVQLQESGPGLVKPSQTLSLTCVVSGGSINSGGYYWSWIRQHPGKGLEWIGFISYNGNTYYNPSLKSRVTIAVDTSKNQFSLNLSSVTAADTAMYYCAREGDNSVFDIWGQGTMVTVSS

SEQ ID NO: 2618 - protein, 11 aa, Artificial Sequence
  Synthetic
AREGDNSVFDI

SEQ ID NO: 2619 - protein, 108 aa, Artificial Sequence
  Synthetic
EIVLTQSPATLSLSPGERATLSCRASQSVGSYLAWYQQKPGQAPRLLIYDTFHRATGIPARFSGGGSGTDFTLTISSLEPEDFAVYYCQQRYNWPPLTFGGGTKVEIK

SEQ ID NO: 2620 - protein, 10 aa, Artificial Sequence
  Synthetic
QQRYNWPPLT

SEQ ID NO: 2621 - protein, 123 aa, Artificial Sequence
  Synthetic
QVQLVESGGGVVKPGRSLRLSCAASGFTFSNYGMHWVRQAPGKGLEWVALISYDGSNKYYVDSVKGRFTISRDNSKNTLFLEVNSLRPEDTAVYYCAKNIRGYSIDWYYFDYWGQGTLVTVSS

SEQ ID NO: 2622 - protein, 16 aa, Artificial Sequence
  Synthetic
AKNIRGYSIDWYYFDY

SEQ ID NO: 2623 - protein, 107 aa, Artificial Sequence
  Synthetic
DIQMTQSPSSLSASVGDRVTITCQASHDVTNYLNWYQQKPGKAPKLLIYEASNLEAGVPSRFSGSGSGTDFTFTITNVQPEDIATYYCQQYHSLPVTFGPGTKVDFK

SEQ ID NO: 2624 - protein, 9 aa, Artificial Sequence
  Synthetic
QQYHSLPVT

SEQ ID NO: 2625 - protein, 122 aa, Artificial Sequence
  Synthetic
EVQLVQSGAEVKKPGESLRISCKGSGYNFMNYWITWVRQMPGKGLEWMGRIDPGDSYIDYSPSFQGHVTISVDKSVNTAYLQWSSLKASDTAVYYCARNKGELDQSDASDMWGQGTLVIVSS

SEQ ID NO: 2626 - protein, 15 aa, Artificial Sequence
  Synthetic
ARNKGELDQSDASDM

SEQ ID NO: 2627 - protein, 107 aa, Artificial Sequence
  Synthetic
DIQMTQSPSTLSASVGDRVTITCRASQSVSRWLAWYRQRPGEAPELLIFEASNLESGVPSRFSGSGSGTEFTLTISSLQPDDFATYYCQHYNSLMCTFGQGTKLEIK

SEQ ID NO: 2628 - protein, 9 aa, Artificial Sequence
  Synthetic
QHYNSLMCT

SEQ ID NO: 2629 - protein, 122 aa, Artificial Sequence
  Synthetic
EVQLVESGGGLVQPGGSLRLSCSASGFNFRNYAMHWVRQAPGKGLEYVSSISSNGGITYYADSVKGRFTISRDNSKNTLFLQMSSLRAEDRALYFCVKDKEETTMVTIFDYWGQGTLVTVSS

SEQ ID NO: 2630 - protein, 15 aa, Artificial Sequence
  Synthetic
VKDKEETTMVTIFDY

SEQ ID NO: 2631 - protein, 107 aa, Artificial Sequence
  Synthetic
DIQMTQSPSSLSASVGDRVTITCRASQSVNNYLNWYQQKPGKAPKLLIYTASSLQSGVPSRFSGTGSGTDFSLTINSLQPEDFATYYCQQSYSSHLTFGPGTSVDIK

SEQ ID NO: 2632 - protein, 9 aa, Artificial Sequence
  Synthetic
QQSYSSHLT

SEQ ID NO: 2633 - protein, 124 aa, Artificial Sequence
  Synthetic
QVQLVQSGAEVKKPGSSVKVSCKASGGTFSSYVINWVRQAPGQGLEWMGSIIPIFGNTYYAQKFQGRITITADESTTTAYMDLSSLRSEDTAKYYCALYSGYDEPLVLWPFDYWGQGTLVTVSS

SEQ ID NO: 2634 - protein, 17 aa, Artificial Sequence
  Synthetic
ALYSGYDEPLVLWPFDY

SEQ ID NO: 2635 - protein, 114 aa, Artificial Sequence
  Synthetic
  misc_feature (15)..(15): Xaa can be any naturally occurring amino acid
DIVMTQSPDSLAVSXGERATINCKSSQKILFSSNNKNYLAWYQQKPGQPPKLLIYWASTRASGVPARFSGSGSGTDFTLTISSLQTEDVAVYYCQQYYSTPPLTFGGGTRVEIK

SEQ ID NO: 2636 - protein, 10 aa, Artificial Sequence
  Synthetic
QQYYSTPPLT

SEQ ID NO: 2637 - protein, 115 aa, Artificial Sequence; identical to SEQ ID NO: 2237
  Synthetic

SEQ ID NO: 2638 - protein, 9 aa, Artificial Sequence
  Synthetic
ARIANYMDV

SEQ ID NO: 2639 - protein, 108 aa, Artificial Sequence; identical to SEQ ID NO: 2239
  Synthetic

SEQ ID NO: 2640 - protein, 10 aa, Artificial Sequence
  Synthetic
QQYNNWPPLT

SEQ ID NO: 2641 - protein, 123 aa, Artificial Sequence
  Synthetic
EVQLVQSGAEVKKSGESLKISCKGSGYSFATYWIGWVRQKPGKGLEWMGIIHPSDSDTKYGPSFQGQVTMSADKSISTAYLQWSSLKTSDTAMYYCARGLSGSYSDDEGVEEWGQGTLVTVSS

SEQ ID NO: 2642 - protein, 16 aa, Artificial Sequence
  Synthetic
ARGLSGSYSDDEGVEE

SEQ ID NO: 2643 - protein, 107 aa, Artificial Sequence
  Synthetic
EIVLTQSPATLSLSPGERATLSCRASQSLSPYLAWYQQKPGQAPRLLIYDASNRATGIPARFSGSGSGTDFTLTISSLEPEDFAVYYCLQRSYWPLTFGQGTKVEIK

SEQ ID NO: 2644 - protein, 9 aa, Artificial Sequence
  Synthetic
LQRSYWPLT

SEQ ID NO: 2645 - protein, 118 aa, Artificial Sequence
  Synthetic
QVQLVQSGAEVKKPGSSVNVSCKASGGTFSTYAIHWVRQAPGQGLEWMGGIIPLFHTANYAQKFQGRVTITADESTSTAYMELSSLRSEDTAMYYCAINTQWDLVPRWGRGTLVTVSS

SEQ ID NO: 2646 - protein, 11 aa, Artificial Sequence
  Synthetic
AINTQWDLVPR

SEQ ID NO: 2647 - protein, 108 aa, Artificial Sequence
  Synthetic
EIVLTQSPGTLSLAPGERATLSCRASQSVNSNYLAWYQQKPGQAPRLLIYGASSRATGIPDRFSGSGSGTDFTLTISRLEPEDFAVYYCQQYGFSLYSFGQGTKLEIK

SEQ ID NO: 2648 - protein, 9 aa, Artificial Sequence
  Synthetic
QQYGFSLYS

SEQ ID NO: 2649 - protein, 124 aa, Artificial Sequence
  Synthetic
QVQLQESGPGLVKPSQTLSLTCTVSGGSITSGDYYWNWIRQHPGKGLEWIGYIYYNGGPYNNPSLKSRPTISLDTSKNQFSLKLTSVTAADTAMYYCARGWASSTWCYGCMDVWGQGTTVTVSS

SEQ ID NO: 2650 - protein, 16 aa, Artificial Sequence
  Synthetic
ARGWASSTWCYGCMDV

SEQ ID NO: 2651 - protein, 112 aa, Artificial Sequence
  Synthetic
DIVMTQTPLSSPVTLGQPASISCRSSQSLVHSDGNTYLSWLQQRPGQPPRLLIYQISNRFSGVPDRFSGSGAGTDFTLKISRVEAEDVGIYYCTQATQFPHTFGQGTKLEIK

SEQ ID NO: 2652 - protein, 9 aa, Artificial Sequence
  Synthetic
TQATQFPHT

SEQ ID NO: 2653 - protein, 128 aa, Artificial Sequence
  Synthetic
QLQLQESGPGLVRPSETLSLTCTVSGVSITSGSYSWGWVRQPPGKGLEWIGTINYSESTYYSPSLKSRVTMSVDTSKNQFSLLLRSVTAADTAVYYCATELYYYDRSGFQHWDGFAIWGQGTMVTVSS

SEQ ID NO: 2654 - protein, 20 aa, Artificial Sequence
  Synthetic
ATELYYYDRSGFQHWDGFAI

SEQ ID NO: 2655 - protein, 108 aa, Artificial Sequence
  Synthetic
EIVMTQSPATLSVSPGERVSLSCRASQGVSSNLAWYQQKPGQAPRLLIYGASTRATGIPARISGSGSGTEFTLTISSLQSEDFAIYYCQQYNNWPRRTFGQGTKLEIK

SEQ ID NO: 2656 - protein, 10 aa, Artificial Sequence
  Synthetic
QQYNNWPRRT

SEQ ID NO: 2657 - protein, 118 aa, Artificial Sequence
  Synthetic
EVQLVESGGGLIQPGGSLRLSCAASGLLVSRNYMTWVRQAPGKGLEWVSVIYSGGSTFYADSVRGRFTISRDNSKNTLYLQMDSLRAEDTAVYYCARDVGDYYGMDVWGQGTTVTVSS

SEQ ID NO: 2658 - protein, 12 aa, Artificial Sequence
  Synthetic
ARDVGDYYGMDV

SEQ ID NO: 2659 - protein, 108 aa, Artificial Sequence
  Synthetic
DIQLTQSPSFLFASVGDRVTITCRASQGMSNYLAWYQQKPGKAPNLLIYTASTLQSGVPSRFSGSGFGTEFTFTISSLQPEDFATYYCQLLNSYPQLTFGGGTKVEIK

SEQ ID NO: 2660 - protein, 10 aa, Artificial Sequence
  Synthetic
QLLNSYPQLT

SEQ ID NO: 2661 - protein, 117 aa, Artificial Sequence
  Synthetic
EVQLVESGGGLIQPGGSLRLSCAASGITVSSNYMSWVRQAPGKGLEWVSVMYAGGSSFYADSVKGRFTISRDNSKNTLYLQMNSLRVEDTAVYYCARDLIALGVDVWGQGTTVTVSS

SEQ ID NO: 2662 - protein, 11 aa, Artificial Sequence
  Synthetic
ARDLIALGVDV

SEQ ID NO: 2663 - protein, 108 aa, Artificial Sequence
  Synthetic
DIQLTQSPSFLSASVGDRVTITCRASQGISSYLAWYQQKPGKAPKLLIYAASTLQSGVPSRFSGSGSGTEFTLTISSLQPEDFATYYCQLLNSYPMCSFGQGTKLEIK

SEQ ID NO: 2664 - protein, 10 aa, Artificial Sequence
  Synthetic
QLLNSYPMCS

SEQ ID NO: 2665 - protein, 116 aa, Artificial Sequence
  Synthetic
EVQLVESGGGLVQPGGSLRLSCAASGIIVSRNYMSWVRQAPEKGLEWVSVIYAGGSAFYADSVKGRFTISRDNSKNTLYLQMNGLRAEDTAIYYCARDVARYSDIWGQGTMVTVSS

SEQ ID NO: 2666 - protein, 10 aa, Artificial Sequence
  Synthetic
ARDVARYSDI

SEQ ID NO: 2667 - protein, 107 aa, Artificial Sequence
  Synthetic
DIQMTQSPSSLSASVGDRVTITCQASQDINNYLNWYQQKPGKAPKLLIYDASNLETGVPSRFRGSRSGTEFTFTISSLQPEDIATYYCQQCDNLPCSFGQGTKLEIK

SEQ ID NO: 2668 - protein, 9 aa, Artificial Sequence
  Synthetic
QQCDNLPCS

SEQ ID NO: 2669 - protein, 129 aa, Artificial Sequence
  Synthetic
EVQLVQSGAEVKKPGESLRISCRGSGYSFTNHWISWVRQTPGKGLEWMGRIDPSDSYTHYSPSFQGHVTFSADKSISTVYLQWSSLKASDTAMYHCARIAPFHDSGSAYYPTQNYMDVWGKGTTVTVSS

SEQ ID NO: 2670 - protein, 22 aa, Artificial Sequence
  Synthetic
ARIAPFHDSGSAYYPTQNYMDV

SEQ ID NO: 2671 - protein, 108 aa, Artificial Sequence
  Synthetic
EIVLTQSPGTLSLSPGERATLSCRASQSVSNSYLAWYQQRPGQAPRLLIFGASSKATGIPDRFSGSGSGTDFTLTISRLEPEDFAVYYCQQYGNLILTFGGGTKVEIK

SEQ ID NO: 2672 - protein, 9 aa, Artificial Sequence
  Synthetic
QQYGNLILT

SEQ ID NO: 2673 - protein, 122 aa, Artificial Sequence
  Synthetic
EVQLVESGGGLVKPGGSLRLSCAASRFTFSSAWMSWVRQAPGKGLEWVGRIKTKTDGETTDYAAPVKGRFTISRDDSKNTLYLQMNSLKTEDTAVYYCSTTNDYGDYSPAYWGQGTLVTVSS

SEQ ID NO: 2674 - protein, 13 aa, Artificial Sequence
  Synthetic
STTNDYGDYSPAY

SEQ ID NO: 2675 - protein, 107 aa, Artificial Sequence
  Synthetic
DIQMTQSPSSLSASVGDRVTITCRASQSISSYLNWYQQKPGKAPKLLIYAASSLQSGVPSRFSGSGSETAFALTISSLQPEDFATYYCQQSYTTPLTFGGGTKVEIK

SEQ ID NO: 2676 - protein, 9 aa, Artificial Sequence
  Synthetic
QQSYTTPLT

SEQ ID NO: 2677 - protein, 129 aa, Artificial Sequence
  Synthetic
QVQLVESGGGVVQPGRSLRLSCAASGFIFSSFGMHWVRQAPGKGLEWVAVISYDGTDKYYGDSVKGRFIISRDNSKNTLHLQMNSLRTEDTAVYYCTRAPRGYYNSSGHYYIVDYFDYWGQGALVTVSS

SEQ ID NO: 2678 - protein, 22 aa, Artificial Sequence
  Synthetic
TRAPRGYYNSSGHYYIVDYFDY

SEQ ID NO: 2679 - protein, 107 aa, Artificial Sequence
  Synthetic
DIQMTQSPSTLSASVGDRVTITCRASQNINNWLAWYQQKPGKVPKVLISESSSLESGVPSRFSGSGSGTEFTLTIISLQPDDFATYYCQQYQSYPLTFGQGTKTEIK

SEQ ID NO: 2680 - protein, 9 aa, Artificial Sequence
  Synthetic
QQYQSYPLT

SEQ ID NO: 2681 - protein, 128 aa, Artificial Sequence
  Synthetic
EVQLVESGGGLVQPGGSLRLSCTASGFAFSSDDMHWVRQRTGKGLECVSVIGTAGDSYYSDSVKGRFTISRENANNTLYLQMNSLRAGDTAVYYCARGTQSSGWYNGGLKYYYYMDVWGKGTTVTVSS

SEQ ID NO: 2682 - protein, 22 aa, Artificial Sequence
  Synthetic
ARGTQSSGWYNGGLKYYYYMDV

SEQ ID NO: 2683 - protein, 108 aa, Artificial Sequence
  Synthetic
DIQMTQSPSSLSASVGDRVTITCRASQSISKYLNWYQQKPGKAPNLLIYAASSLQSGVPSRFSGSGSGTDFTLTISSLQLEDFATYYCQQSYSTPFGTFGGGTKVEIK

SEQ ID NO: 2684 - protein, 10 aa, Artificial Sequence
  Synthetic
QQSYSTPFGT

SEQ ID NO: 2685 - protein, 120 aa, Artificial Sequence
  Synthetic
QVQLQESGPGLVKPSETLSLTCTVSGGSVSSGTYYWSWIRQPPGKGLEWIGYIYYSGNTNYNPSLKSRVTISLDTSKNQFSLKLNSVTAADTAVYYCARESGVGGTFDYWGQGTLVTVSS

SEQ ID NO: 2686 - protein, 12 aa, Artificial Sequence
  Synthetic
ARESGVGGTFDY

SEQ ID NO: 2687 - protein, 109 aa, Artificial Sequence
  Synthetic
EIVLTQSPGTLSLSPGERATLSCRASQTVSSSYLAWYQQKPGQAPRLLIFGASRRATGIPVRFSGGGSGTDFTLTISRLEAEDFAVYYCQQYGSSPSYTFGQGTKLEIK

SEQ ID NO: 2688 - protein, 10 aa, Artificial Sequence
  Synthetic
QQYGSSPSYT

SEQ ID NO: 2689 - protein, 123 aa, Artificial Sequence
  Synthetic
QVQLVQSGAEVKKPGASVKVSCKASGYTFTNYYMHWVRQAPGQGLEWMGIINPDGGSTTYAQKFQGRVTMTRDTSTSTVYMELRSLRSEDTAMYYCARDHDFIPTITRGFDLWGQGTLVTVSS

SEQ ID NO: 2690 - protein, 16 aa, Artificial Sequence
  Synthetic
ARDHDFIPTITRGFDL

SEQ ID NO: 2691 - protein, 108 aa, Artificial Sequence
  Synthetic
EIVLTQSPGTLSLSPGERATLSCRASQSVSSTYLAWYQQKPGQAPRLLIYGASSRATGIPDRFSGSGSGTDFTLTISRLEPEDFAVYYCQQSGISLLTFGGGTKVEIK

SEQ ID NO: 2692 - protein, 9 aa, Artificial Sequence
  Synthetic
QQSGISLLT

SEQ ID NO: 2693 - protein, 118 aa, Artificial Sequence
  Synthetic
QVQLQQWGAGLLKPSETLSLTCVVYGGSFSAYYWSWIRQPPGKGLEWIGEINHSGSTNYKSSLQSRVTISVDTSKNQFSLKLSSVTAADTAVYYCARETGTYGTFDHWGQGTPVTVSS

SEQ ID NO: 2694 - protein, 12 aa, Artificial Sequence
  Synthetic
ARETGTYGTFDH

SEQ ID NO: 2695 - protein, 107 aa, Artificial Sequence; identical to SEQ ID NO: 96
  Synthetic

SEQ ID NO: 2696 - protein, 9 aa, Artificial Sequence
  Synthetic
QQYAFSVWT

SEQ ID NO: 2697 - protein, 115 aa, Artificial Sequence; identical to SEQ ID NO: 2237
  Synthetic

SEQ ID NO: 2698 - protein, 9 aa, Artificial Sequence
  Synthetic
ARIANYMDV

SEQ ID NO: 2699 - protein, 108 aa, Artificial Sequence; identical to SEQ ID NO: 2239
  Synthetic

SEQ ID NO: 2700 - protein, 10 aa, Artificial Sequence
  Synthetic
QQYNNWPPLT

SEQ ID NO: 2701 - protein, 125 aa, Artificial Sequence
  Synthetic
QVQLQESGPGLVKPSQTLSLTCTVSGGSISSSNYYWSWIRQHPGKGLEWIGYIDYSGGTYYNPSLKSRVTISVDTSKNQFSLKLSSVTAADTAVYYCARVSTTVTTYLVGGFDIWGQGTMVTVSS

SEQ ID NO: 2702 - protein, 17 aa, Artificial Sequence
  Synthetic
ARVSTTVTTYLVGGFDI

SEQ ID NO: 2703 - protein, 107 aa, Artificial Sequence
  Synthetic
DIQMTQSPSSLSASVGDRVTITCQASQDITNYLNWYQQKPGKAPKLLLYDASNLETGVPSRFSGSGSGTDFTFTISSLQPEDIATYYCQQYDNLPWTFGQGTKVEIK

SEQ ID NO: 2704 - protein, 9 aa, Artificial Sequence
  Synthetic
QQYDNLPWT

SEQ ID NO: 2705 - protein, 121 aa, Artificial Sequence
  Synthetic
  misc_feature (45)..(45): Xaa can be any naturally occurring amino acid
  misc_feature (59)..(59): Xaa can be any naturally occurring amino acid
EVQLLESGGGLVQPGGSLRLSCAASGLTFSRYAMSWVRQAPGKGXEWFSGIGGDRDRSXYADSAKGRFTISRDNSKSTLYLQMNSLRTEDTAVYYCAKDVVSWPHYYFDFWGQGTLVTVSS

SEQ ID NO: 2706 - protein, 14 aa, Artificial Sequence
  Synthetic
AKDVVSWPHYYFDF

SEQ ID NO: 2707 - protein, 107 aa, Artificial Sequence
  Synthetic
DIQMTQSPSSLSASVGDRVTITCQASQDINNYLNWYQQKPGKAPKLLIYDASNLEAGVPSRFSGRGSGTDFTFTISSLQPEDIATYYCQQYDNLLITFGQGTRLDIK

SEQ ID NO: 2708 - protein, 9 aa, Artificial Sequence
  Synthetic
QQYDNLLIT

SEQ ID NO: 2709 - protein, 122 aa, Artificial Sequence
  Synthetic
EVQLVQSGAEVKKPGESLRISCKGFGYSFTNYWIGWVRQMPGKGLEWMGIIYPGDSDTKYSPSFQGQVTMSADKSTNTAYLHWSSLKASDTAMYYCARRGYNYGNYYYLDVWGKGTPVTVSS

SEQ ID NO: 2710 - protein, 15 aa, Artificial Sequence
  Synthetic
ARRGYNYGNYYYLDV

SEQ ID NO: 2711 - protein, 108 aa, Artificial Sequence
  Synthetic
DIQMTQSPSSLSASVGDSVTITCRASQSISTYLNWYQQKPGKAPKLLIYDASSLQSGVPSRFSGSGSGTDFTLTLSSLQPEDFATYYCQQSFSTLALTFGGGTKVEIK

SEQ ID NO: 2712 - protein, 10 aa, Artificial Sequence
  Synthetic
QQSFSTLALT

SEQ ID NO: 2713 - protein, 121 aa, Artificial Sequence
  Synthetic
QVQLQESGPGLVKPSETLSLTCAVSGGSISSYYWSWIRQPPGKGLEWIGYIDTSGSTNYNPSLKSRVTMSVDTSKNQFSLNVNSVTAADTAVYFCGVCAGDCYAASVFDYRGQGTLVTVSS

SEQ ID NO: 2714 - protein, 15 aa, Artificial Sequence
  Synthetic
GVCAGDCYAASVFDY

SEQ ID NO: 2715 - protein, 107 aa, Artificial Sequence
  Synthetic
DIQMTQSPSSLSASVGDRVTITCQASQDIIFYLNWYQQKPGKAPKLLIYDASNLKTGVPSRFSGSGSGTDFAFTISSLQPEDIATYYCQQYDNLPLTFGGGTKVEIK

SEQ ID NO: 2716 - protein, 9 aa, Artificial Sequence
  Synthetic
QQYDNLPLT

SEQ ID NO: 2717 - protein, 122 aa, Artificial Sequence; identical to SEQ ID NO: 101
  Synthetic

SEQ ID NO: 2718 - protein, 15 aa, Artificial Sequence
  Synthetic
ARGDCLSSSCYSLDY

SEQ ID NO: 2719 - protein, 107 aa, Artificial Sequence
  Synthetic
DIQMTQSPSSLSASVGDRVTITCRASQSITSYLSWYLQKPGEAPKLLIYAASILQSGVPSRFGGNGSGTDFTLTISSLQPEDFATFYCQQTYRSPLTFGGGTRVEIK

SEQ ID NO: 2720 - protein, 9 aa, Artificial Sequence
  Synthetic
QQTYRSPLT

SEQ ID NO: 2721 - protein, 130 aa, Artificial Sequence
  Synthetic
QVQLVESGGGVVQPGRSLRLSCAASGFSFRIFGMNWVRQAPGKGLDWVAGISHDGSDKYFADSVKGRFTISRDNSKNTLYLQMNSLRADDTAVYYCARDMEVDYYDRSGHYHVFHAFDIWGQGTVVTVSS

SEQ ID NO: 2722 - protein, 23 aa, Artificial Sequence
  Synthetic
ARDMEVDYYDRSGHYHVFHAFDI

SEQ ID NO: 2723 - protein, 113 aa, Artificial Sequence
  Synthetic
DIVMTQSPDSLAVSLGARATINCKSSQSILYSSDNKSSLAWYQQKPGHPPKLLIYWASTRESGVPDRFSGSESGTDFTLTISNLQGEDVAVYYCQQYYSIPRSFGQGTKLEIK

SEQ ID NO: 2724 - protein, 9 aa, Artificial Sequence
  Synthetic
QQYYSIPRS

SEQ ID NO: 2725 - protein, 121 aa, Artificial Sequence
  Synthetic
QVQLQESGPGLVKPSQTLSLTCTVSGGSISSGGYYWSWIRQHPGKGLEWIGYIYYSGSTYYNPSLKSRVSISVDTSKNQFSLKLSSVTAADTAVYYCARGVGFGELGFDPWGQGTLVTVSS

SEQ ID NO: 2726 - protein, 13 aa, Artificial Sequence
  Synthetic
ARGVGFGELGFDP

SEQ ID NO: 2727 - protein, 108 aa, Artificial Sequence
  Synthetic
DIQLTQSPSFLSASVGDRVTITCRASQGISSYLAWYQQKPGKAPKLLIYGASTLQSGVPSRFSGSGSGTEFTLTISSLQPEDFATYYCQQLNSYPPITFGQGTRLEIK

SEQ ID NO: 2728 - protein, 10 aa, Artificial Sequence
  Synthetic
QQLNSYPPIT

SEQ ID NO: 2729 - protein, 119 aa, Artificial Sequence
  Synthetic
QVQLQESGPGLVRPSQILSLTCTVSGGSISSGGYYWSWIRQHPGKGLEWIGYIYYSGSTYYNPSLKSRVSISVDTSKNQFSLKLSSVTAADTAVFYCATFTVAGHFLFWGQGTLVTVSS

SEQ ID NO: 2730 - protein, 11 aa, Artificial Sequence
  Synthetic
ATFTVAGHFLF

SEQ ID NO: 2731 - protein, 106 aa, Artificial Sequence
  Synthetic
DIQMTQSPSSLSASVGDRVTITCQASQDSTNHLNWYQQKPGKAPKLLIYDASNLETGVPSRFSGSGSGTDFTFTISSLQPEDIATYYCQHYDDLPSFGPGTKVDFK

SEQ ID NO: 2732 - protein, 8 aa, Artificial Sequence
  Synthetic
QHYDDLPS

SEQ ID NO: 2733 - protein, 117 aa, Artificial Sequence
  Synthetic
EVQLVESGGGLIQPGGSLRLSCAASGITVSSNYMSWVRQAPGKGLEWVSIIYAGGSSFYADSVKGRFTISRDNSKNTLYLQMNSLRAEDTAVYYCARDLIALGVDVWGQGTTVTVSS

SEQ ID NO: 2734 - protein, 11 aa, Artificial Sequence
  Synthetic
ARDLIALGVDV

SEQ ID NO: 2735 - protein, 108 aa, Artificial Sequence
  Synthetic
DIQLTQSPSFLSASVGDRVTITCRASQGISTYLAWYQQKPGKAPKLLIYAASTLQSGVPSRFSGSGSGTEFTLTISSLQPEDFATYYCQLLDSYPMCSFGQGTKLEIK

SEQ ID NO: 2736 - protein, 10 aa, Artificial Sequence
  Synthetic
QLLDSYPMCS

SEQ ID NO: 2737 - protein, 129 aa, Artificial Sequence
  Synthetic
QVQLVQSGAEVKKPGASVKVSCKASGYTFTDYYIHCVRQAPGQGLEWMGMINPGGGSTSYAQKFQGRVTMTRDTSTTTVYMEMSSLRSEDTAVYYCVRGENSFDSSGNEQYNNYAMDVWGQGTTVTVSS

SEQ ID NO: 2738 - protein, 22 aa, Artificial Sequence
  Synthetic
VRGENSFDSSGNEQYNNYAMDV

SEQ ID NO: 2739 - protein, 107 aa, Artificial Sequence
  Synthetic
DIQMTQSPSSLSASVGDRVTITCRASQGISNYLAWFQQKPGKAPKSLIYAASNLQSGVPSRFSGSGSGTDFTLTISSLQPEDFATYYCQQYNSYPPTFGGGTKVEIK

SEQ ID NO: 2740 - protein, 9 aa, Artificial Sequence
  Synthetic
QQYNSYPPT

SEQ ID NO: 2741 - protein, 121 aa, Artificial Sequence
  Synthetic
QVQLQESGPGLVKPSETLSLTCAVSGGSISSYYWSWIRQPPGKGLEWIGYIDTSGSTNYNPSLKSRVTLSVDTSKNQFSLNLSSVTAADTAVYFCGVCAGDCYSASVFDYWGQGTLVTVSS

SEQ ID NO: 2742 - protein, 15 aa, Artificial Sequence
  Synthetic
GVCAGDCYSASVFDY

SEQ ID NO: 2743 - protein, 107 aa, Artificial Sequence; identical to SEQ ID NO: 2715
  Synthetic

SEQ ID NO: 2744 - protein, 9 aa, Artificial Sequence
  Synthetic
QQYDNLPLT

SEQ ID NO: 2745 - protein, 127 aa, Artificial Sequence
  Synthetic
QVQLVESGGGVVQPGRSLRLSCAASGFTFGHYGMHWVRQAPGKGLEWVAVILYDGSNTYYADSVKGRFTISRDNSKNTLYLQMNSLRTEDTAVYYCAKAPSPYCGGGDCYSSGFDPWGQGSLVTVSS

SEQ ID NO: 2746 - protein, 20 aa, Artificial Sequence
  Synthetic
AKAPSPYCGGGDCYSSGFDP

SEQ ID NO: 2747 - protein, 107 aa, Artificial Sequence
  Synthetic
DIQMTQSPSSLSASVGDRVTITCQASQDITDYLNWYQQKPGKAPKLLIYDASNLETGVPSRFSGSGTGTDFSFTISSLQPEDFATYYCQQYANLPLTFGGGTKVEIK

SEQ ID NO: 2748 - protein, 9 aa, Artificial Sequence
  Synthetic
QQYANLPLT

SEQ ID NO: 2749 - protein, 123 aa, Artificial Sequence
  Synthetic
EVQLVQSGAEVKKPGESLKISCKGSGYTFTKYWIAWVRQMPGKGLEWMGFIYPADSDTRYSPSFEGQVTISADKSTSTAYLQWSSLKASDTAIYYCARPGGKGEHYHGPIDYWGQGTLVTVSS

SEQ ID NO: 2750 - protein, 16 aa, Artificial Sequence
  Synthetic
ARPGGKGEHYHGPIDY

SEQ ID NO: 2751 - protein, 107 aa, Artificial Sequence
  Synthetic
DIQMTQSPSSLSASVGDRVTITCQASQDISDYLNWYQQKPGKAPKLLIYDASNLETGVPSRFSGSGSGTDFTFTISSLQPKDIATYYCQQYNNFPPSFGQGTKLEIK

SEQ ID NO: 2752 - protein, 9 aa, Artificial Sequence
  Synthetic
QQYNNFPPS

SEQ ID NO: 2753 - protein, 130 aa, Artificial Sequence; identical to SEQ ID NO: 2281
  Synthetic

SEQ ID NO: 2754 - protein, 23 aa, Artificial Sequence
  Synthetic
AREQEANYYDISGYYHWGESLGY

SEQ ID NO: 2755 - protein, 109 aa, Artificial Sequence
  Synthetic
DIQLTQSPSFLSASVGDRVTITCRASQGISSYLAWYQQKPGKAPKFLIYGASTLQSGVPSRFSGSGSGTEFTLTISSLQPEDFASYYCQKVNSYPPGLTFGGGTKVEIK

SEQ ID NO: 2756 - protein, 11 aa, Artificial Sequence
  Synthetic
QKVNSYPPGLT

SEQ ID NO: 2757 - protein, 121 aa, Artificial Sequence
  Synthetic
QVQLQESGPGLVKPSQTLSLSCTVSGGSISSGGYYWSWIRQHPGKGLEWIGYIYYSGSTYYNPSLKSRITMSVDTSKNQFSLKLSSVTAADTAVYYCARDYVTGRGAFDIWGQGTMVIVSS

SEQ ID NO: 2758 - protein, 13 aa, Artificial Sequence
  Synthetic
ARDYVTGRGAFDI

SEQ ID NO: 2759 - protein, 106 aa, Artificial Sequence
  Synthetic
DIQMTQSPSSLSASVGDRVTITCQASRDISNYLNWYQQRPGEAPKLLIYDASNLETGVPSRFSGSGSGTDFTFTISSLQPEDIATYYCQQYDTFPCTFGQGTKLEI

SEQ ID NO: 2760 - protein, 9 aa, Artificial Sequence
  Synthetic
QQYDTFPCT

SEQ ID NO: 2761 - protein, 127 aa, Artificial Sequence
  Synthetic
EVQLLESGGGLVQPGGSLRLSCVVSGFTFKNYAMSWVRQAPGKGLEWVSGINGYNDNTYYAASVKGRFTISRDNSKNTLYLQMNSLRLEDTAVYFCAKRGYHYDSSAYFSPYYFDYWGQGTLVTVSS

SEQ ID NO: 2762 - protein, 20 aa, Artificial Sequence
  Synthetic
AKRGYHYDSSAYFSPYYFDY

SEQ ID NO: 2763 - protein, 107 aa, Artificial Sequence
  Synthetic
DIQMTQSPSSLFASIGDRVTITCQGSQDISNHLNWYQQKPGKAPKLLIYDASNLETGVPSRFSGNGSGTDFTFTIASLQPEDIATYYCQQYDTLPPFFGGGTKVEIK

SEQ ID NO: 2764 - protein, 9 aa, Artificial Sequence
  Synthetic
QQYDTLPPF

SEQ ID NO: 2765 - protein, 121 aa, Artificial Sequence
  Synthetic
QVQLVQSGAEVKKPGSSVKVSCKASGDTYNTYAISWVRQAPGQGLEYMGGITLVFGTTNYAQKFQGRLTITTDESTTTFYMDLISLRSEDTAIYYCARAGVAYGDYVPDYWGQGTLVIVSS

SEQ ID NO: 2766 - protein, 14 aa, Artificial Sequence
  Synthetic
ARAGVAYGDYVPDY

SEQ ID NO: 2767 - protein, 109 aa, Artificial Sequence
  Synthetic
EIVLTQSPGTLSLSPGERATLSCRASQSISSNYLAWYQQNPGQAPRLLIYGASSRATGIPDRFSGSGSGTDFTLTISRLEPEDFAVYYCQQYGNSPPWTFGQGTKVEIK

SEQ ID NO: 2768 - protein, 10 aa, Artificial Sequence
  Synthetic
QQYGNSPPWT

SEQ ID NO: 2769 - protein, 128 aa, Artificial Sequence
  Synthetic
EVQLVESGGGLVQPGGSLRLSCAASGFTFSSYCMNWVRQAPGKGLEWVSYISSSSNIIYYADSVKGRFTISRDNAKNSLYLQMNSLRAEDTAVYYCARDLRTYNDFWSGHGPYFFDYWGQGTLVTVSS

SEQ ID NO: 2770 - protein, 21 aa, Artificial Sequence
  Synthetic
ARDLRTYNDFWSGHGPYFFDY

SEQ ID NO: 2771 - protein, 107 aa, Artificial Sequence
  Synthetic
DIQMTQSPSTLSASVGDRVTITCRASQSISSWLAWYQQKPGKAPKLLIYKASSLESGVPSRFSGSGSETEFTLTISSLQPDDFATYYCQQYNHYSYTFGQGTKLEIK

SEQ ID NO: 2772 - protein, 9 aa, Artificial Sequence
  Synthetic
QQYNHYSYT

SEQ ID NO: 2773 - protein, 127 aa, Artificial Sequence
  Synthetic
EVQLVESGGGLVQPGGSLRLSCAASGFTFSSHSMSWVRQAPVKGLEWVSYISGRSSTIYYADSVKGRFTISRDNAKNSLYLQMNSLRDEDTAVYYCARAMAPTYNDFYSGPDVFDIWGQGTMVTVSS

SEQ ID NO: 2774 - protein, 20 aa, Artificial Sequence
  Synthetic
ARAMAPTYNDFYSGPDVFDI

SEQ ID NO: 2775 - protein, 107 aa, Artificial Sequence
  Synthetic
DIQMTQSPSTLSASVGDRVTITCRASQTISSWLAWYQQKPGKAPKVLIYKASSLETGVPSRFSGSGSGTEFTLTIINLQPDDFATYYCQQYNSYSVTFGGGTKVEIK

SEQ ID NO: 2776 - protein, 9 aa, Artificial Sequence
  Synthetic
QQYNSYSVT

SEQ ID NO: 2777 - protein, 116 aa, Artificial Sequence
  Synthetic
QVQLQESGPGLVKPSGTLSLTCAVSGASITSSNWWSWVRQPPGEGLEWIGEIYHNGNTEYNPSLKSRVTISVDKSKNQFSLKLSSVTAADTAVYYCARVSGMFDYWGQGSLVTVSS

SEQ ID NO: 2778 - protein, 9 aa, Artificial Sequence
  Synthetic
ARVSGMFDY

SEQ ID NO: 2779 - protein, 106 aa, Artificial Sequence
  Synthetic
DIQMTQSPSSLSASVGDRVTITCRASQGISNSLAWYQQKPGKAPKLLLYAASTLESGVPSRFSGSGSGTEYTLTISSLQPEDFATYYCQQYYSIRTFGQGTRVDIK

SEQ ID NO: 2780 - protein, 8 aa, Artificial Sequence
  Synthetic
QQYYSIRT

SEQ ID NO: 2781 - protein, 132 aa, Artificial Sequence
  Synthetic
QVQLVESGGGVVQPGRSLRLSCAASGFTFSSYGMHWVRQAPGKGLEWVATIWYDGSEKYYADSVKGRFTISRDNSKNTLYLQMNSLRAEDTAVFYCARDVTPYYYGSGSYYKLGETTHPDYWGQGTLVTVSS

SEQ ID NO: 2782 - protein, 25 aa, Artificial Sequence
  Synthetic
ARDVTPYYYGSGSYYKLGETTHPDY

SEQ ID NO: 2783 - protein, 106 aa, Artificial Sequence
  Synthetic
DIQMTQSPSTLSASVGDRVTITCRASQSIGVWLAWYQQKPGKAPKLLIYKASSLETGVPSRFSGSGSGTEFTLTINSLQPDDFATYHCQQYNSFPLTFGQGTKLEI

SEQ ID NO: 2784 - protein, 9 aa, Artificial Sequence
  Synthetic
QQYNSFPLT

SEQ ID NO: 2785 - protein, 120 aa, Artificial Sequence
  Synthetic
QVQLQESGPGLVKPSGTLSLTCAVSGGSISNNNWWSWVRQPPGKGLEWIGEIFHSGTITYNPSLKSRVTISVDKSKNQFSLKLKSVTAADTAVYYCARAWIQPHNWFDPWGQGILVTVSS

SEQ ID NO: 2786 - protein, 13 aa, Artificial Sequence
  Synthetic
ARAWIQPHNWFDP

SEQ ID NO: 2787 - protein, 108 aa, Artificial Sequence
  Synthetic
EIVLTQSPGTLSLSPGERATLSCRASQTVSSSYLAWYQQKPGQAPRLLIYGASSRATGIPDRFSGSGSGTDFTLTISRLEPEDFAVYYCQQYGSSPRTFGQGTKLEIK

SEQ ID NO: 2788 - protein, 9 aa, Artificial Sequence
  Synthetic
QQYGSSPRT

SEQ ID NO: 2789 - protein, 120 aa, Artificial Sequence
  Synthetic
QVQLVESGGGVVQPGRSLRLSCAASGFAFSNYGMHWVRQAPGKGLDWVAVIWYDGSNKYYADSVKGRFTISRDNSKNTLYLQMNSLRAENTAVYYCARDPMIVVVEMDYWGQGTLVTVSS

SEQ ID NO: 2790 - protein, 13 aa, Artificial Sequence
  Synthetic
ARDPMIVVVEMDY

SEQ ID NO: 2791 - protein, 112 aa, Artificial Sequence
  Synthetic
DVVMTQSPLSLPVTLGQPASISCRSGQSLVHSDGNTYLNWFQQRPGQSPRRLIYRVSNRDSGVPDRFSGSGSGTDFTLKISRVEADDVGVYYCMQGTHWPYTFGQGTKLEIK

SEQ ID NO: 2792 - protein, 9 aa, Artificial Sequence
  Synthetic
MQGTHWPYT

SEQ ID NO: 2793 - protein, 122 aa, Artificial Sequence
  Synthetic
EVQLVESGGTLVQPGGSLRLSCSASGFTFSTYTMHWVRQAPGKGLEYVSGISITGDIAYYADSVKGRFTISRDNSKNTLYFQMSSLRPEDTALYYCVKDRDSSTWYDAFDIWGQGTMVTVSS

SEQ ID NO: 2794 - protein, 15 aa, Artificial Sequence
  Synthetic
VKDRDSSTWYDAFDI

SEQ ID NO: 2795 - protein, 107 aa, Artificial Sequence
  Synthetic
DIQMTQSPSSLSASVGDRVTITCRARQSITSYLNWYQQKPGKAPKLLIYAASSLQSGVPSRFSGSGSGTDFTLTISSLQPEDFATYYCQQSYSTPWTFGQGTKVEIK

SEQ ID NO: 2796 - protein, 9 aa, Artificial Sequence
  Synthetic
QQSYSTPWT

SEQ ID NO: 2797 - protein, 118 aa, Artificial Sequence
  Synthetic
QVQLQQWGAGLLKPSETLSLTCAVYGGSFSDYYWSWIRQPPGKGLEWIGENNHSGKTNYNPSLESRVTISVDTSKNQFSLKLTSVTAADTAVYYCARESGTYATFDYWGQGTLVTVSS

SEQ ID NO: 2798 - protein, 12 aa, Artificial Sequence
  Synthetic
ARESGTYATFDY

SEQ ID NO: 2799 - protein, 108 aa, Artificial Sequence
  Synthetic
EIVLTQSPGTLSLSPGERVTLSCRASQNVSSAYLAWYQQKPGQAPRLLIYGASSRATGIPDRFSGSGSGTDFTLTISRLEPEDFAVYYCQQYGYTIWTFGQGTKVEIK

SEQ ID NO: 2800 - protein, 9 aa, Artificial Sequence
  Synthetic
QQYGYTIWT

SEQ ID NO: 2801 - protein, 126 aa, Artificial Sequence
  Synthetic
EVQLVQSGAEVKKPGESLKISCKGSGYSFTSYWIGWVRQMPGRGLEWMGIIYPGDSDTKYSPSFQGQVTISADKSISTAYLQWSSLKASDTAMYYCARRNLITADGPFYYYGMDVWGQGTTVTVSS

SEQ ID NO: 2802 - protein, 19 aa, Artificial Sequence
  Synthetic
ARRNLITADGPFYYYGMDV

SEQ ID NO: 2803 - protein, 107 aa, Artificial Sequence
  Synthetic
AIQLTQSPSSLSASVGDRVTITCRASQGISGALAWYQQKPGNAPDLLIYDASGLESGVPSRFSGSGSGTDFTLTISSLQPEDFATYYCQQFNSYSSTFGQGTRLEIK

SEQ ID NO: 2804 - protein, 9 aa, Artificial Sequence
  Synthetic
QQFNSYSST

SEQ ID NO: 2805 - protein, 118 aa, Artificial Sequence
  Synthetic
EVQLVETGGGLIQPGGSLRLSCAASEFTVSSNYMSWVRQAPGKGLEWVSLIYSGGSTYYADSVKGRFTISRDNSKNTLYLQMNSLRAEDTAVYYCARVLPFGDYFDYWGQGTLVTVSS

SEQ ID NO: 2806 - protein, 12 aa, Artificial Sequence
  Synthetic
ARVLPFGDYFDY

SEQ ID NO: 2807 - protein, 111 aa, Artificial Sequence
  Synthetic
  misc_feature (110)..(110): Xaa can be any naturally occurring amino acid
QSVLTQPPSVSGAPGQRVTISCTGSSSNIGAGYDVHWCQQLPGTAPKLLIYGYSNRPSGVPDRFSGSKSGTSASLAITGLQAEDEADYYCQSYDINLSAWVFGGGTRLTXL

SEQ ID NO: 2808 - protein, 11 aa, Artificial Sequence
  Synthetic
QSYDINLSAWV

SEQ ID NO: 2809 - protein, 129 aa, Artificial Sequence [sequence omitted]

SEQ ID NO: 2810 - protein, 23 aa, Artificial Sequence
  Synthetic
ARDSSEVRDHPGHPGRSVGAFDI

SEQ ID NO: 2811 - protein, 110 aa, Artificial Sequence
  Synthetic
QSVLTQPASVSGSPGQSITISCTGTSNDVGSYTLVSWYQQYPGKAPKLLIFEGTKRSSGISNRFSGSKSGNTASLTISGLQGEDEADYYCCSYAGASTFVFGGGTKLTVL

SEQ ID NO: 2812 - protein, 10 aa, Artificial Sequence
  Synthetic
CSYAGASTFV

SEQ ID NO: 2813 - protein, 127 aa, Artificial Sequence
  Synthetic
EVQLVESGGGLVQPGGSLRLSCVASGFTFSSYWMHWVRQVPGKGPVWVSHINSEGSSTNYADSVRGRFTISRDNAKDTLYLQMNNLRAEDTAVYYCARPTAVAAAGNYFYYYGMDVWGQGTTVTVSS

SEQ ID NO: 2814 - protein, 20 aa, Artificial Sequence
  Synthetic
ARPTAVAAAGNYFYYYGMDV

SEQ ID NO: 2815 - protein, 110 aa, Artificial Sequence
  Synthetic
QSVLTQPASVSGSPGQSITISCTGTSSDVGYYNFVSWYQQHPGKAPKLMIYEVSNRPSGVSNRFSGSKSGNTASLIISGLQAEDEADYYCSSYRSSSTLVFGGGTKLTVL

SEQ ID NO: 2816 - protein, 10 aa, Artificial Sequence
  Synthetic
SSYRSSSTLV

SEQ ID NO: 2817 - protein, 118 aa, Artificial Sequence
  Synthetic
QVQLQESGPGLVKPSETLSLTCTVSGGSISSYYWSWIRQPPGKGLEWIGYIYTSGSTNYNPSLKSRVTISVDTSKNQFSLKLSSVTAADTAVYYCARHSWLRGMADYWGQGTLVTVSS

SEQ ID NO: 2818 - protein, 12 aa, Artificial Sequence
  Synthetic
ARHSWLRGMADY

SEQ ID NO: 2819 - protein, 110 aa, Artificial Sequence
  Synthetic
NFMLTQPHSVSESPGKTVTISCTGSSGSIASNYVQWYQQRPGSAPTTVIYEDNQRPSGVPDRFSGSIDSSSNSASLTISGLKTEDEADYYCQSYDSSIWVFGGGTKLTVL

SEQ ID NO: 2820 - protein, 9 aa, Artificial Sequence
  Synthetic
QSYDSSIWV

SEQ ID NO: 2821 - protein, 131 aa, Artificial Sequence
  Synthetic
EVQLVESGGGLIQPGGSLRLSCAASGFTVSNNYMSWVRQAPGKGLEWVSVIYSGGSTYYADSVKGRFTISRDKSKNTLYLQMNRLRAEDTAVYYCAREGEVEGYNDFWSGYSRDRYYFDYWGQGTLVTVSS

SEQ ID NO: 2822 - protein, 25 aa, Artificial Sequence
  Synthetic
AREGEVEGYNDFWSGYSRDRYYFDY

SEQ ID NO: 2823 - protein, 110 aa, Artificial Sequence
  Synthetic
QSVLTQPASVSGSPGQSITISCTGTSSDVGGYNYVSWYQQHPGKAPKLMIYDVSNRPSGVSNRFSGSKSGNTASLTISGLQAEDEADYYCSSYTSSSTRVFGTGTKVTVL

SEQ ID NO: 2824 - protein, 10 aa, Artificial Sequence
  Synthetic
SSYTSSSTRV

SEQ ID NO: 2825 - protein, 121 aa, Artificial Sequence
  Synthetic
QVQLQESGPGLVKPSETLSLTCTVSGDSMSSYFWTWIRQPPGKGLECIGYFYPSGSTNYNPSLKSRVTISIDTSKNQFSLKLSSVTAADTAVYYCARLKQQLVGFGWFDPWGQGTLVTVSS

SEQ ID NO: 2826 - protein, 15 aa, Artificial Sequence
  Synthetic
ARLKQQLVGFGWFDP

SEQ ID NO: 2827 - protein, 110 aa, Artificial Sequence
  Synthetic
QSVLTQPPSVSGAPGQRVTISCTGSSSNIGADYDVHWYQQFPGTAPKVLIYANTNRPSGVPERFSGSKSGTSASLAITGLQAEDEADYYCQSYDHSLNWVFGGGTKLTVL

SEQ ID NO: 2828 - protein, 10 aa, Artificial Sequence
  Synthetic
QSYDHSLNWV

SEQ ID NO: 2829 - protein, 127 aa, Artificial Sequence
  Synthetic
QVQLVQSGAEVKKPGASVKVSCKASGYTFTSYGISWVRQAPGQGLEWMGWISAYNGNTNYAQKLQGRVTMTTDTSTSTAYMELRSLRSDDTAVYYCARVPASYGDDDYYYYYGMDVWGQGTTVTVSS

SEQ ID NO: 2830 - protein, 20 aa, Artificial Sequence
  Synthetic
ARVPASYGDDDYYYYYGMDV

SEQ ID NO: 2831 - protein, 108 aa, Artificial Sequence
  Synthetic
SYVLTQPPSVSVSPGQTARITCSGDALPKQYAYWYQQKPGQAPVLVIYKDSERPSGIPERFSGSSSGTTVTLTISGVQAEDEADYYCQSADSSGTLWVFGGGTKLTVL

SEQ ID NO: 2832 - protein, 11 aa, Artificial Sequence
  Synthetic
QSADSSGTLWV

SEQ ID NO: 2833 - protein, 122 aa, Artificial Sequence
  Synthetic
QVQLQESGPGLVKPSETLSLTCTVSGGSISSYYWSWIRQPPGKGLEWIGYIYYSRSTNYNPSLKSRVTISVDTSKNQFSLKLSSVTAADTAVYYCARHDTIFGVGQYYFDYWGQGTLVTVSS

SEQ ID NO: 2834 - protein, 16 aa, Artificial Sequence
  Synthetic
ARHDTIFGVGQYYFDY

SEQ ID NO: 2835 - protein, 110 aa, Artificial Sequence
  Synthetic
QSVLTQPASVSGSPGQSVTISCTGTSSDVGSYNLVSWYQQHPGKAPKVMIYEDSKRPSGVSNRFSGSKSGNTASLTISGLQAEDEADYYCCSYAGSSTWVFGGGTKLTVL

SEQ ID NO: 2836 - protein, 10 aa, Artificial Sequence
  Synthetic
CSYAGSSTWV

SEQ ID NO: 2837 - protein, 124 aa, Artificial Sequence
  Synthetic
QVQLVESGGGVVQPGRSLRLSCAASGFTFSNYGMHWVRQAPGKGLEWVAVISYDGNNKYYADSVKGRFTISRDNSKNTLYLQMNSLRAEDTAVYYCAKDPFPLAVAGTGYFDYWGQGTLVTVSS

SEQ ID NO: 2838 - protein, 17 aa, Artificial Sequence
  Synthetic
AKDPFPLAVAGTGYFDY

SEQ ID NO: 2839 - protein, 108 aa, Artificial Sequence
  Synthetic
SYVLTQPPSVSVAPGQTARISCGGNNIGSKNVHWYQQKPGQAPVLVVYDDSDRPSGIPERFSGSNSGNTATLTISRVEAGDEADYYCQVWDSSSDPWVFGGGTKLTVL

SEQ ID NO: 2840 - protein, 11 aa, Artificial Sequence
  Synthetic
QVWDSSSDPWV

SEQ ID NO: 2841 - protein, 131 aa, Artificial Sequence
  Synthetic
QVQLVQSGAEVKKPGASVKVSCKASGYTFTTYYMHWVRQAPGQGLEWMGIINPSGGSTSYAQKFQGRVTMTRDTSTSTVYMELNSLRSEDTAVYYCARGGSSRYCSSTSCYSFGVDNFDYWGQGTLVTVSS

SEQ ID NO: 2842 - protein, 24 aa, Artificial Sequence
  Synthetic
ARGGSSRYCSSTSCYSFGVDNFDY

SEQ ID NO: 2843 - protein, 109 aa, Artificial Sequence
  Synthetic
SYVLTQPPSVSVAPGQTARITCGGNNIGSKSVHWYQQKPGQAPVLVVYDDGDRPSGIPERFSGSNSGNTATLTISRVEAGDEADYYCQVWDSSSDHYYVFGTGTKVTVL

SEQ ID NO: 2844 - protein, 12 aa, Artificial Sequence
  Synthetic
QVWDSSSDHYYV

SEQ ID NO: 2845 - protein, 120 aa, Artificial Sequence
  Synthetic
EVQLVQSGAEVKKPGESLKISCKGSGYRFTNYWIGWVRQMPGKGLEWMGIIYPGDSDTRYSPSFQGQVTISADKSITTAYLQWSSLKASDTAMYYCARLSDRWYSPFDPWGQGTLVTVSS

SEQ ID NO: 2846 - protein, 13 aa, Artificial Sequence
  Synthetic
ARLSDRWYSPFDP

SEQ ID NO: 2847 - protein, 110 aa, Artificial Sequence
  Synthetic
QSVLTQEPSLTVSPGGTVTLTCGSSTGAVTSGHYPYWFQQKSGQAPRTLIYETSIKHSWTPARFSGSLLGGKAALTLSGAQPEDEADYYCLLSYSGARPVFGGGTKLTVL

SEQ ID NO: 2848 - protein, 10 aa, Artificial Sequence
  Synthetic
LLSYSGARPV

SEQ ID NO: 2849 - protein, 120 aa, Artificial Sequence; identical to SEQ ID NO: 2845
  Synthetic

SEQ ID NO: 2850 - protein, 13 aa, Artificial Sequence
  Synthetic
ARLSDRWYSPFDP

SEQ ID NO: 2851 - protein, 110 aa, Artificial Sequence; identical to SEQ ID NO: 2847
  Synthetic

SEQ ID NO: 2852 - protein, 10 aa, Artificial Sequence
  Synthetic
LLSYSGARPV

SEQ ID NO: 2853 - protein, 129 aa, Artificial Sequence
  Synthetic
EVQLVESGGGLVQPGGSLRLSCAASGFSVSTKYMTWVRQAPGKGLEWVSVLYSGGSDYYADSVKGRFTISRDNSKNALYLQMSSLRVEDTGIYYCARDSSEVRDHPGHPGRSVGAFDIWGQGTMVTVSS

SEQ ID NO: 2854 - protein, 23 aa, Artificial Sequence
  Synthetic
ARDSSEVRDHPGHPGRSVGAFDI

SEQ ID NO: 2855 - protein, 110 aa, Artificial Sequence; identical to SEQ ID NO: 2811
  Synthetic

SEQ ID NO: 2856 - protein, 10 aa, Artificial Sequence
  Synthetic
CSYAGASTFV

SEQ ID NO: 2857 - protein, 118 aa, Artificial Sequence
  Synthetic
EVQLVESGGGLVKPGGSLRLSCAASGFTFSSYIMNWVRQAPGKGLEWVSSISSSSSYIYYADSVKGRFTISRDNAKNSLYLQMNSLRAEDTAVYYCAREAEWEAFDIWGQGTMVTVSS

SEQ ID NO: 2858 - protein, 11 aa, Artificial Sequence
  Synthetic
AREAEWEAFDI

SEQ ID NO: 2859 - protein, 110 aa, Artificial Sequence
  Synthetic
QSVLTQPRSVSGSPGQSVTISCTGTSSDVGGYNYVSWYQQHPGKAPKLMICDVSKRPSGVPDRFSGSKSGNTASLTISGLQAEDEADYYCCSYAGSYTWVFGGGTKLTVL

SEQ ID NO: 2860 - protein, 10 aa, Artificial Sequence
  Synthetic
CSYAGSYTWV

SEQ ID NO: 2861 - protein, 123 aa, Artificial Sequence
  Synthetic
QVQLVESGGGVVQPGRSLRLSCAASGFTFSSYGMHWVRQAPGKGLEWVAVISYDGSNKYYADSVKGRFTISRDNSKNTLYLQMNSLRAEDTAVYYCAKVDGSYYYYYYGMDVWGQGTTVTVSS

SEQ ID NO: 2862 - protein, 16 aa, Artificial Sequence
  Synthetic
AKVDGSYYYYYYGMDV

SEQ ID NO: 2863 - protein, 111 aa, Artificial Sequence
  Synthetic
QSVLTQPASVSGSPGQSITISCTGTSSDVGAYNYVSWYQQHPGKAPKLMIYEVSNRPSGVSNRFSGSKSGNTASLTISGLQAEDEADYYCSSYTSSSTAWVFGGGTKLTVL

SEQ ID NO: 2864 - protein, 11 aa, Artificial Sequence
  Synthetic
SSYTSSSTAWV

SEQ ID NO: 2865 - protein, 127 aa, Artificial Sequence
  Synthetic
QVQLQQSGPGLVKPSQTLSLTCAISGDSVSSNTAAWNWIRQSPSRGLEWLGRTYYRSKWYNDYAVSVISRIIINPDTSKNQFSLQLKSVTPEDTAVYYCARDILRDTSWPHDAFDIWGQGTMVTVSS

SEQ ID NO: 2866 - protein, 17 aa, Artificial Sequence
  Synthetic
ARDILRDTSWPHDAFDI

SEQ ID NO: 2867 - protein, 112 aa, Artificial Sequence
  Synthetic
QSVLTQPASVSGSPGQSITISCTGTSSDVGGYNYLSWYQQHPGKAPKLMIYEVSNRPSGVSNRFSGSKSGNTASLTISGLQAEDEADYYCSSYTSSSTPFYVFGTGTKVTVL

SEQ ID NO: 2868 - protein, 12 aa, Artificial Sequence
  Synthetic
SSYTSSSTPFYV

SEQ ID NO: 2869 - protein, 130 aa, Artificial Sequence
  Synthetic
QVQLVQSGAEVKKPGASVKVSCKASGYIFTDYSMHWVRQAPGQGLEWIGWVNPNSGGTNYAQKFQGWVTMARDTSITTVYMELSRLKSDDTAVYFCARGPLFHRLVYDFWSGYHDGFDMWGQGTMVTVSS

SEQ ID NO: 2870 - protein, 23 aa, Artificial Sequence
  Synthetic
ARGPLFHRLVYDFWSGYHDGFDM

SEQ ID NO: 2871 - protein, 110 aa, Artificial Sequence
  Synthetic
QSVLTQPASVSGSPGQSITISCTGTSSDVGGYKFVSWYQQHPGKAPKLMIYEVSNRPSGVSNRFSGSKSGNTASLTISGLQAEDEADYYCNSYTSSSTWVFGGGTKLTVL

SEQ ID NO: 2872 - protein, 10 aa, Artificial Sequence
  Synthetic
NSYTSSSTWV

SEQ ID NO: 2873 - protein, 122 aa, Artificial Sequence
  Synthetic
EVQLVESGGGLVKPGGSLRLSCAASGFTFSSYSMNWVRQAPGKGLEWVSSISSSSSYIYYADSVKGRFTISRDNAKNSLYLQMNSLRAEDTAVYYCARERGYYGGKTPPFLGGQGTLVTVSS

SEQ ID NO: 2874 - protein, 15 aa, Artificial Sequence
  Synthetic
ARERGYYGGKTPPFL

SEQ ID NO: 2875 - protein, 111 aa, Artificial Sequence; identical to SEQ ID NO: 78
  Synthetic

SEQ ID NO: 2876 - protein, 10 aa, Artificial Sequence
  Synthetic
QSYDSSNYWV

SEQ ID NO: 2877 - protein, 132 aa, Artificial Sequence
  Synthetic
EVQLLESGGGLVQPGGSLRLSCAASGFTFSSYAMSWVRQAPGKGLEWVSAISGSGGSTYYADSVKGRFTISRDNSKNTLYLQMNSLRAEDTAVYYCAKSGGRHYYDSSGYYRLPLDDAFDIWGQGTMVTVSS

SEQ ID NO: 2878 - protein, 25 aa, Artificial Sequence
  Synthetic
AKSGGRHYYDSSGYYRLPLDDAFDI

SEQ ID NO: 2879 - protein, 112 aa, Artificial Sequence
  Synthetic
QSVLTQPPSVSGAPGQRVTISCTGSSSSIGAGYDVHWYQQLPGTAPKLLIYGNSNRPSGVPDRFSGSKSGTSASLAITGLQAEDEADYYCQSYDSSLSGSWVFGGGTKLTVL

SEQ ID NO: 2880 - protein, 12 aa, Artificial Sequence
  Synthetic
QSYDSSLSGSWV

SEQ ID NO: 2881 - protein, 134 aa, Artificial Sequence
  Synthetic
QVQLQESGPGLVKPSETLSLTCTVSGGSISSYYWSWIRQPPGKGLEWIGYIYYSGSTNYNPSLKSRVTISVDTSKNQFSLKLSSVTAADTAVYYCARYQLAPGSGSYYNWGGYPRESEYYFDYWGQGTLVTVSS

SEQ ID NO: 2882 - protein, 28 aa, Artificial Sequence
  Synthetic
ARYQLAPGSGSYYNWGGYPRESEYYFDY

SEQ ID NO: 2883 - protein, 110 aa, Artificial Sequence
  Synthetic
QSVLTQPRSVSGSPGQSVTISCTGTSSDVGGYNYVSWYQQHPGKAPKLMIYDVSKRPSGVPDRFSGSKSGNTASLTISGLQAEDEADYYCCSYAGSYTWVFGGGTKLTVL

SEQ ID NO: 2884 - protein, 10 aa, Artificial Sequence
  Synthetic
CSYAGSYTWV

SEQ ID NO: 2885 - protein, 121 aa, Artificial Sequence
  Synthetic
QVQLQESGPGLVKPSQTLSLTCAVSGDSIRSGGYYWSWVRQHPGRGLEWIGYIYFSGTTYYNPSLKSRVTISVDTSEKQFSLKLTSVTDADTAVYFCARVKGWLRGYFDYWGQGAPVTVSA

SEQ ID NO: 2886 - protein, 13 aa, Artificial Sequence
  Synthetic
ARVKGWLRGYFDY

SEQ ID NO: 2887 - protein, 110 aa, Artificial Sequence; identical to SEQ ID NO: 98
  Synthetic

SEQ ID NO: 2888 - protein, 10 aa, Artificial Sequence
  Synthetic
QSYDSGSHVV

SEQ ID NO: 2889 - protein, 129 aa, Artificial Sequence [sequence omitted]

SEQ ID NO: 2890 - protein, 23 aa, Artificial Sequence
  Synthetic
ARDSSEVRDHPGHPGRSVGAFDI

SEQ ID NO: 2891 - protein, 110 aa, Artificial Sequence
  Synthetic
QSVLTQPASVSGSPGQSITISCTGTSNDVGSYTLVSWYQQYPGKAPKLLIFEVTKRSSGISNRFSGSKSGNTASLTISGLQGEDEADYYCCSYAGASTFVFGGGTKLTVL

SEQ ID NO: 2892 - protein, 10 aa, Artificial Sequence
  Synthetic
CSYAGASTFV

SEQ ID NO: 2893 - protein, 125 aa, Artificial Sequence
  Synthetic
QVQLVQSGAEVKKPGASVKVSCKASGYTFTSYYIHWVRQAPGQGLEWMGIINPSDGGTSYAQKFQGRVTMTRDTSTSTVYMELSSLRSEDTAVYSCARASTSTTNWNDALSLGCWGQGTLVTVSS

SEQ ID NO: 2894 - protein, 18 aa, Artificial Sequence
  Synthetic
ARASTSTTNWNDALSLGC

SEQ ID NO: 2895 - protein, 113 aa, Artificial Sequence
  Synthetic
QSVLTQPPSVSGAPGQRVTISCTGSSSNIGAGYDVHWYQQLPGTAPKLLIYGNSNRPSGVPDRFSGSKSGTSASLAITGLQAEDEADYYCQSYDSGLSGSGVVFGGGTKLTVL

SEQ ID NO: 2896 - protein, 13 aa, Artificial Sequence
  Synthetic
QSYDSGLSGSGVV

SEQ ID NO: 2897 - protein, 124 aa, Artificial Sequence
  Synthetic
QVQLVESGGGVVQPGRSLRLSCAASGFTFSSYGMHWVRQAPGKGLEWVAVIWYDGSNKYYADSVKGRFTISRDNSKNTLYLQMNSLRAEDTAVYYCARDRKYSSGWSVVNFDYWGQGTLVTVSS

SEQ ID NO: 2898 - protein, 17 aa, Artificial Sequence
  Synthetic
ARDRKYSSGWSVVNFDY

SEQ ID NO: 2899 - protein, 110 aa, Artificial Sequence
  Synthetic
QSVLTQPPSVSEAPRQRVTISCSGSSSNIGNNAVNWYQQLPGKAPKLLIYYDDLLPSGVSDRFSGSKSGTSASLAISGLQSEDEADYYCAAWDDSLNGWVFGGGTKLTVL

SEQ ID NO: 2900 - protein, 11 aa, Artificial Sequence
  Synthetic
AAWDDSLNGWV

SEQ ID NO: 2901 - protein, 119 aa, Artificial Sequence
  Synthetic
QVQLVESGGGVVQPGRSLRLSCADSGFTFSTYGMHWVRQAPGKGLEWVALISYDGSNKYYADSVKGRFTISGDNSKNTLYLQMNSLRAEDTAVYYCARAEWLRGAFDIWGQGTMVTVSS

SEQ ID NO: 2902 - protein, 12 aa, Artificial Sequence
  Synthetic
ARAEWLRGAFDI

SEQ ID NO: 2903 - protein, 111 aa, Artificial Sequence
  Synthetic
NFMLTQPHSVSESPGKTVTISCTGSSGSIASNYVQWYQQRPGSAPTTVIYEDNQRPSGVPDRFSGSIDSSSNSASLTISGLKTEDEADYYCQSYDSTNHWVFGGGTKLTVL

SEQ ID NO: 2904 - protein, 10 aa, Artificial Sequence
  Synthetic
QSYDSTNHWV

SEQ ID NO: 2905 - protein, 131 aa, Artificial Sequence
  Synthetic
EVQLVESGGGLIQPGGSLRLSCAASGFSVSSNYMSWVRQAPGKGLEWVSVIYSGGSTYYADSVKGRFTISRDNSKNTLYLQMNSLRAEDTAVYYCAREGEVEGYYDFWSGYSRDRYYFDYWGQGTLVTVSS

SEQ ID NO: 2906 - protein, 25 aa, Artificial Sequence
  Synthetic
AREGEVEGYYDFWSGYSRDRYYFDY

SEQ ID NO: 2907 - protein, 110 aa, Artificial Sequence
  Synthetic
QSVLTQPASVSGSPGQSITISCTGTSSDVGGYNYVSWYQQHPGKAPKLMIYDVSNRPSGVSNRFSGSKSGNTASLTISGLQAEDEADYYCSSYTSSTTRVFGTGTRVTVL

SEQ ID NO: 2908 - protein, 10 aa, Artificial Sequence
  Synthetic
SSYTSSTTRV

SEQ ID NO: 2909 - protein, 131 aa, Artificial Sequence
  Synthetic
EVQLVESGGGLIQPGGSLRLSCAASGFTVSNNYMSWVRQAPGKGLEWVSVIYSGGSTYYADSLKGRFTISRDNSKNTLYLQMNSLRAEDTAVYYCAREGEVEGYYDFWSGYSRDRYYFDYWGQGTLVTVSS

SEQ ID NO: 2910 - protein, 25 aa, Artificial Sequence
  Synthetic
AREGEVEGYYDFWSGYSRDRYYFDY

SEQ ID NO: 2911 - protein, 110 aa, Artificial Sequence
  Synthetic
QSALTQPASVSGSPGQSITISCTGTSSDVGGYNYVSWYQQHPGKAPKLMIYDVSNRPSGVSNRFSGSKSGNTASLTISGLQAEDEADYYCSSYTSISTRVFGTGTKVTVL

SEQ ID NO: 2912 - protein, 10 aa, Artificial Sequence
  Synthetic
SSYTSISTRV

SEQ ID NO: 2913 - protein, 122 aa, Artificial Sequence
  Synthetic
QVQLVQSGAEVKKPGASVKVSCKASGYTFTGYYIHWVRQAPGQGLEWMGWINPNSGGTKYAQKFQGWVTMTRDTSITTVYMELSRLRSDDTAVYYCARGTEYNWNSAHFDPWGQGTLVTVSS

SEQ ID NO: 2914 - protein, 15 aa, Artificial Sequence
  Synthetic
ARGTEYNWNSAHFDP

SEQ ID NO: 2915 - protein, 111 aa, Artificial Sequence
  Synthetic
QSALTQPASVSGSPGQSITISCTGTSSDVGGYNYVSWYQQHPGKAPKLMIYEVSNRPSGVSNRFSGSKSGNTASLTISGLQAEDEADYYCSSYTSSSTSWVFGGGTKLTVL

SEQ ID NO: 2916 - protein, 11 aa, Artificial Sequence
  Synthetic
SSYTSSSTSWV

SEQ ID NO: 2917 - protein, 129 aa, Artificial Sequence; identical to SEQ ID NO: 2853
  Synthetic

SEQ ID NO: 2918 - protein, 23 aa, Artificial Sequence
  Synthetic
ARDSSEVRDHPGHPGRSVGAFDI

SEQ ID NO: 2919 - protein, 110 aa, Artificial Sequence
  Synthetic
QSALTQPASVSGSPGQSITISCTGTSNDVGSYTLVSWYQQYPGKAPKLLIFEGTKRSSGISNRFSGSKSGNTASLTISGLQGEDEADYYCCSYAGASTFVFGGGTKLTVL

SEQ ID NO: 2920 - protein, 10 aa, Artificial Sequence
  Synthetic
CSYAGASTFV

SEQ ID NO: 2921 - protein, 115 aa, Artificial Sequence
  Synthetic
EVQLVESGGGLVKPGGSLRLSCAASGFTFSSYSMNWVRQAPGKGLEWVSSISSSTSYIYYADSVKGRFTISRDNAKNSLYLQMNSLRAEDTAVYYCARERYGDNWGQGTLVTVSS

SEQ ID NO: 2922 - protein, 8 aa, Artificial Sequence
  Synthetic
ARERYGDN

SEQ ID NO: 2923 - protein, 109 aa, Artificial Sequence
  Synthetic
QLVLTQSPSASASLGASVKLTCTLSSGHSSYAIAWHQQQPEKGPRYLMSLNSDGSHSKGDGIPDRFSGSSSGAERYLTISSLQSEDEADYYCQTWGPWVFGGGTKLTVL

SEQ ID NO: 2924 - protein, 7 aa, Artificial Sequence
  Synthetic
QTWGPWV

SEQ ID NO: 2925 - protein, 127 aa, Artificial Sequence
  Synthetic
QLQLQESGSRLVKPSQTLSLTCAVSGGSISSGGYSWSWIRQPPGKGLQWIGYIYHSGSTYYNPSLKSRVTISVDRSKNQFSLKLSSVTAADTAVYYCARFTNPNYYDSSGYYGFDYWGQGTLVTVSS

SEQ ID NO: 2926 - protein, 19 aa, Artificial Sequence
  Synthetic
ARFTNPNYYDSSGYYGFDY

SEQ ID NO: 2927 - protein, 110 aa, Artificial Sequence
  Synthetic
QSVLTQPPSASGSPGQSVTISCTGTSSDVGGYNYVSWYQQHPGKAPKLMIYEVSKRPSGVPDRLSGSKSGNTASLTVSGLQAEDEADYYCTSYAGSNNWVFGGGTKLTVL

SEQ ID NO: 2928 - protein, 10 aa, Artificial Sequence
  Synthetic
TSYAGSNNWV

SEQ ID NO: 2929 - protein, 131 aa, Artificial Sequence
  Synthetic
QVQLVQSGAEVKKPGASVKVSCKASGYTFTGYYLHWVRQAPGQGLEWMGWINPNSGGTNYAQKFQGWVTMTRDTSISTAYMELSRLRSDDTAVYYCARTPRVYDPTLPNQWLVGEYYCDYWGQGTLVTVSS

SEQ ID NO: 2930 - protein, 24 aa, Artificial Sequence
  Synthetic
ARTPRVYDPTLPNQWLVGEYYCDY

SEQ ID NO: 2931 - protein, 110 aa, Artificial Sequence
  Synthetic
QSALTQPRSVSGSPGQSVTISCTGTSSDVGGYNYVSWYQQHPGKAPKLMIYDVSKRPSGVPDRFSGSKSGNTASLTISGLQAEDEADYYCCSYAGSYTWVFGGGTKLTVL

SEQ ID NO: 2932 - protein, 10 aa, Artificial Sequence
  Synthetic
CSYAGSYTWV

SEQ ID NO: 2933 - protein, 119 aa, Artificial Sequence
  Synthetic
EVQLVESGGGLVQPGGSLRLSCAASGFTFSSYWMHWVRQAPGKGLVWVSHINGDGSSTSYADSVKGRFTISRDNAKNTLYLQMNSLRAEDTAVYYCASAFWQRGNFDYWGQGTLVTVSS

SEQ ID NO: 2934 - protein, 12 aa, Artificial Sequence
  Synthetic
ASAFWQRGNFDY

SEQ ID NO: 2935 - protein, 111 aa, Artificial Sequence
  Synthetic
NFMLTQPHSVSESPGKTVTISCTGSSGSIASNYVQWYQQRPGSAPTTVIYEDNQRPSGVPDRFSGSIDSSSNSASLTISGLKTEDEADYYCQSYDSSILWVFGGGTKLTVL

SEQ ID NO: 2936 - protein, 10 aa, Artificial Sequence
  Synthetic
QSYDSSILWV

SEQ ID NO: 2937 - protein, 120 aa, Artificial Sequence
  Synthetic
QVQLVQSGAEVKKPGASVKVSCKASGYTFTSYDISWVRQAPGQGLEWMGWINAYNGNTNYAQKLQGRVTMTTDTSTSTAYMELRSLRSDDTAVYYCARPSSSLTSYFDYWGQGTLVTVSS

SEQ ID NO: 2938 - protein, 13 aa, Artificial Sequence
  Synthetic
ARPSSSLTSYFDY

SEQ ID NO: 2939 - protein, 109 aa, Artificial Sequence
  Synthetic
SYVLTQPPSVSVAPGQTARITCGGNNIGSKNVHWYQQKPGQAPVLVVYDDSDRPSGIPERFSGSNSGNTATLTISRVEAGDEADYYCQVWDSSSDRHWVFGGGTKLTVL

SEQ ID NO: 2940 - protein, 12 aa, Artificial Sequence
  Synthetic
QVWDSSSDRHWV

SEQ ID NO: 2941 - protein, 122 aa, Artificial Sequence
  Synthetic
EVQLVESGGGLVKPGGSLRLSCAASGFTFSSYNMNWVRQAPGKGLEWVSCISSSSSYIYYADSVKGRFTISRDNAKNSLYLQMNSLRAEDTAVYYCARERGYDGGKTPPFLGGQGTLVTVSS

SEQ ID NO: 2942 - protein, 15 aa, Artificial Sequence
  Synthetic
ARERGYDGGKTPPFL

SEQ ID NO: 2943 - protein, 111 aa, Artificial Sequence; identical to SEQ ID NO: 78
  Synthetic

SEQ ID NO: 2944 - protein, 10 aa, Artificial Sequence
  Synthetic
QSYDSSNYWV

SEQ ID NO: 2945 - protein, 131 aa, Artificial Sequence
  Synthetic
EVQLVESGGGLIQPGGSLRLSCAASGFTVSSNYMSWVRQAPGKGLEWVSVIYSGGSTYYADSVKGRFTISRDNSKNTLYLQMNSLRAEDTAVYYCAREGDVEGYYDFWSGYSRDRYYFDYWGQGTLVTVSS

SEQ ID NO: 2946 - protein, 25 aa, Artificial Sequence
  Synthetic
AREGDVEGYYDFWSGYSRDRYYFDY

SEQ ID NO: 2947 - protein, 110 aa, Artificial Sequence
  Synthetic
QSALTQPASVSGSPGQSITISCTGTSSDVGGYNYVSWYQQHPGKAPKLMIYDVSNRPSGVSNRFSGSKSGNTASLTISGLQAEDEADYYCSSYTSSSTRVFGTGTKVTVL

SEQ ID NO: 2948 - protein, 10 aa, Artificial Sequence
  Synthetic
SSYTSSSTRV

SEQ ID NO: 2949 - protein, 120 aa, Artificial Sequence
  Synthetic
QVQLVQSGAEVKKPGASVKVSCMASGYTLTAYYIHWVRQAPGQGLESLGWINPRTGGTTILQKFQGWVTMTRDTSINTVYLELPRVTLADTAVYYCVRGGTWNYVGGEVWGQGTAVTVSS

SEQ ID NO: 2950 - protein, 13 aa, Artificial Sequence
  Synthetic
VRGGTWNYVGGEV

SEQ ID NO: 2951 - protein, 111 aa, Artificial Sequence
  Synthetic
QSALTQPASVSGSPGQSITVSCAGSSTDVGGYNFVSWYQHHPGRVPKLIIYEVNNRPSGVSVRFSGSKSGNTASLTISGLQAEDEADYYCTSFTSSSDSWIFGGGTKLTVL

SEQ ID NO: 2952 - protein, 11 aa, Artificial Sequence
  Synthetic
TSFTSSSDSWI

SEQ ID NO: 2953 - protein, 131 aa, Artificial Sequence
  Synthetic
EVQLVESGGGLIQPGGSLRLSCAASGFTVRNNYMSWVRQAPGKGLEWVSVIYSGGSTYYADSVKGRFTISRDNSKNTLYLQMNSLRAEDTAVYYCAREGEVEGYYDFWSGYSRDRYYFDYWGQGTLVTVSS

SEQ ID NO: 2954 - protein, 25 aa, Artificial Sequence
  Synthetic
AREGEVEGYYDFWSGYSRDRYYFDY

SEQ ID NO: 2955 - protein, 110 aa, Artificial Sequence; identical to SEQ ID NO: 2947
  Synthetic

SEQ ID NO: 2956 - protein, 10 aa, Artificial Sequence
  Synthetic
SSYTSSSTRV

SEQ ID NO: 2957 - protein, 131 aa, Artificial Sequence; identical to SEQ ID NO: 2905
  Synthetic

SEQ ID NO: 2958 - protein, 25 aa, Artificial Sequence
  Synthetic
AREGEVEGYYDFWSGYSRDRYYFDY

SEQ ID NO: 2959 - protein, 110 aa, Artificial Sequence; identical to SEQ ID NO: 2907
  Synthetic

SEQ ID NO: 2960 - protein, 10 aa, Artificial Sequence
  Synthetic
SSYTSSTTRV

SEQ ID NO: 2961 - protein, 129 aa, Artificial Sequence [sequence omitted]

SEQ ID NO: 2962 - protein, 23 aa, Artificial Sequence
  Synthetic
ARDSSEVRDHPGHPGRSVGAFDI

SEQ ID NO: 2963 - protein, 110 aa, Artificial Sequence; identical to SEQ ID NO: 2811
  Synthetic

SEQ ID NO: 2964 - protein, 10 aa, Artificial Sequence
  Synthetic
CSYAGASTFV

SEQ ID NO: 2965 - protein, 122 aa, Artificial Sequence
  Synthetic
EVQLVESGGGLIQPGGSLRLSCAASGFTVSSNYMSWVRQAPGKGLEWVSVIYSGYSTYYVDSVKGRFTISRDNSKNTLYLQMNSLRAEDTAVYYCARVGGAHSGYDGSFDYWGQGTLVTVSS

SEQ ID NO: 2966 - protein, 16 aa, Artificial Sequence
  Synthetic
ARVGGAHSGYDGSFDY

SEQ ID NO: 2967 - protein, 110 aa, Artificial Sequence
  Synthetic
QSALTQPASVSGSPGQSITISCTGTSSDVGSYNLVSWYQQHPGKAPKLMIYEGSKRPSGVSNRFSGSKSGNTASLTISGLQAEDEADYYCCSYAGSSTWVFGGGTKLTVL

SEQ ID NO: 2968 - protein, 10 aa, Artificial Sequence
  Synthetic
CSYAGSSTWV

SEQ ID NO: 2969 - protein, 123 aa, Artificial Sequence; identical to SEQ ID NO: 103
  Synthetic

SEQ ID NO: 2970 - protein, 17 aa, Artificial Sequence
  Synthetic
ARDLRDQDGYSYGAFDY

SEQ ID NO: 2971 - protein, 110 aa, Artificial Sequence; identical to SEQ ID NO: 104
  Synthetic

SEQ ID NO: 2972 - protein, 10 aa, Artificial Sequence
  Synthetic
SSYTSSSSWV

SEQ ID NO: 2973 - protein, 121 aa, Artificial Sequence
  Synthetic
  misc_feature (45)..(45): Xaa can be any naturally occurring amino acid
  misc_feature (61)..(61): Xaa can be any naturally occurring amino acid
  misc_feature (72)..(72): Xaa can be any naturally occurring amino acid
EVQLVESGGGLVKPGGSLRLSCAVSGFTFSNVWMRWVRQAPGKGXEWVGRIKSKTDGGTTXYAAPVKGRFTXSRDDSKNTLYLQMNSLKTEDTAVYYCTSQVWLRGPGDYWGQGTLVTVSS

SEQ ID NO: 2974 - protein, 12 aa, Artificial Sequence
  Synthetic
TSQVWLRGPGDY

SEQ ID NO: 2975 - protein, 111 aa, Artificial Sequence; identical to SEQ ID NO: 110
  Synthetic

SEQ ID NO: 2976 - protein, 10 aa, Artificial Sequence
  Synthetic
QSYDSSLNWV

SEQ ID NO: 2977 - protein, 122 aa, Artificial Sequence
  Synthetic
QVQLVESGGGVVQPGRSLRLSCAASGFTFSSYGMHWVRQAPGKGLEWVAVISYDGSNKHYADSVKGRFTISRDNSKNTLYLQMNSLRAEDTAVYYCAKDPWELRQGNYFDYWGQGTLVTVSS

SEQ ID NO: 2978 - protein, 15 aa, Artificial Sequence
  Synthetic
AKDPWELRQGNYFDY

SEQ ID NO: 2979 - protein, 108 aa, Artificial Sequence
  Synthetic
SYVLTQPPSVSVAPGQTARITCGGNNIGSKNVHWYQQKPGQAPVLVVYDDSDRPSGIPERFSGSNSGTTATLTISRVEAGDEADYYCQVWDSSSDPWVFGGGTKLTVL

SEQ ID NO: 2980 - protein, 11 aa, Artificial Sequence
  Synthetic
QVWDSSSDPWV

SEQ ID NO: 2981 - protein, 129 aa, Artificial Sequence
  Synthetic
EVQLVESGGGLVQPGGSLRLSCAASGFSVSTKYMTWVRQAPGKGLEWVSALYSGGSDYYADSVKGRFTISRDNSKNTLYLQMSSLRVEDTGVYYCARDSSEVRDHPGHPGRSVGAFDIWGQGTMVTVSS

SEQ ID NO: 2982 - protein, 23 aa, Artificial Sequence
  Synthetic
ARDSSEVRDHPGHPGRSVGAFDI

SEQ ID NO: 2983 - protein, 110 aa, Artificial Sequence
  Synthetic
QSALTQPASVSGSPGQSITISCTGTSNDVGSYTLVSWYQQYPGKAPKLLIFEDTKRSSGISNRFSGSKSGNTASLTISGLQGEDEADYYCCSYAGTSTFVFGGGTKLTVL

SEQ ID NO: 2984 - protein, 10 aa, Artificial Sequence
  Synthetic
CSYAGTSTFV

SEQ ID NO: 2985 - protein, 120 aa, Artificial Sequence
  Synthetic
EVQLVQSGAEVKKPGESLKISCKISGYSFTNYWIAWVRQMPGKGLEWMGIIYPGDSDTIYSPSFQGQVTMSVDKSTATAYLQWSSLKASDTAMYYCARQPTLYYYDSRDWGQGTLVTVSS

SEQ ID NO: 2986 - protein, 13 aa, Artificial Sequence
  Synthetic
ARQPTLYYYDSRD

SEQ ID NO: 2987 - protein, 110 aa, Artificial Sequence
  Synthetic
QSVLTQPPSASGTPGQRVAISCSGSSSNIGSNPLNWLQQLPGTAPKVLIYNNHQRPSGVPDRFSGSKSGTSASLAISGLQSEDEADYYCAAWDDSLNGWVFGGGTKLTVL

SEQ ID NO: 2988 - protein, 11 aa, Artificial Sequence
  Synthetic
AAWDDSLNGWV

SEQ ID NO: 2989 - protein, 133 aa, Artificial Sequence
  Synthetic
EVQLVESGGGLIQPGGSLRISCAASGFTVSGFILSNNYMGWVRQAPGKALEWVSIIYRGGTPYYTDSVMGRFTISRDNSKNTLYLQMNSLRAEDTAVYYCARGGWYYDSGGYYLRRTEGFDIWGQGTMVTVSS

SEQ ID NO: 2990 - protein, 22 aa, Artificial Sequence
  Synthetic
ARGGWYYDSGGYYLRRTEGFDI

SEQ ID NO: 2991 - protein, 112 aa, Artificial Sequence
  Synthetic
QSVLTQPPSVSGAPGQKVTISCTGSSSNIGAGHDVHWYQQLPGTAPKLLIYGDNNRPSGVPDRFSASKSGTSASLAITGLQAEDEADYYCQSYDSSLSVFYVFGTGTQVTVL

SEQ ID NO: 2992 - protein, 12 aa, Artificial Sequence
  Synthetic
QSYDSSLSVFYV

SEQ ID NO: 2993 - protein, 131 aa, Artificial Sequence; identical to SEQ ID NO: 71
  Synthetic

SEQ ID NO: 2994 - protein, 25 aa, Artificial Sequence
  Synthetic
AREGDVEGISDSWSGYSRDRYYFDH

SEQ ID NO: 2995 - protein, 110 aa, Artificial Sequence; identical to SEQ ID NO: 72
  Synthetic

SEQ ID NO: 2996 - protein, 10 aa, Artificial Sequence
  Synthetic
SSFTSNNTRV

SEQ ID NO: 2997 - protein, 121 aa, Artificial Sequence
  Synthetic
QVQLQESGPGLVKPSQTLSLTCGVSGDSISSGGHFWSWVRQHPGTGLEWIAYSPFSGTTYYNPSLKSRVTLSVDTSKNQFFLSLTSVTDADTAVYFCARVKGWLRGYFDHWGQGVPVTVSA

SEQ ID NO: 2998 - protein, 13 aa, Artificial Sequence
  Synthetic
ARVKGWLRGYFDH

SEQ ID NO: 2999 - protein, 110 aa, Artificial Sequence; identical to SEQ ID NO: 88
  Synthetic

SEQ ID NO: 3000 - protein, 10 aa, Artificial Sequence
  Synthetic
QSYEIDSHVV

SEQ ID NO: 3001 - protein, 131 aa, Artificial Sequence
  Synthetic
EVQLVESGGGLIRPGGSLRLSCAASGFAVTNNYMSWVRQAPGKGLEWVSVIYSGGTTYYADSVKGRFTISRDNSRNMLSLQMNSLRAEDTAVYYCAREGDVEGYDGFSSGYSRDRYYFDYWGQGTLVTVSS

SEQ ID NO: 3002 - protein, 25 aa, Artificial Sequence
  Synthetic
AREGDVEGYDGFSSGYSRDRYYFDY

SEQ ID NO: 3003 - protein, 109 aa, Artificial Sequence
  Synthetic
QSVLTQPASVSGSPGQSITISCTGTSSDVGGFNYVSWYQQHPGKAPKLVIYDVTNRPSGVSNRFSGSKSGDTASLTISGLQPEDEADYYCSSFTARNTRVFGTGTKVTV

SEQ ID NO: 3004 - protein, 10 aa, Artificial Sequence
  Synthetic
SSFTARNTRV

SEQ ID NO: 3005 - protein, 120 aa, Artificial Sequence
  Synthetic
QVQLQESGPGLAKPSQTLSLTCSVSGDSITRGGYYWSWIRQHPGKGLEWIGYIYYSGSTHYNPSLKSRLAMSADTSKNQFSLKLRSVTAADTAVYYCARTTAWPPHFDYWGQGALVTVSS

SEQ ID NO: 3006 - protein, 12 aa, Artificial Sequence
  Synthetic
ARTTAWPPHFDY

SEQ ID NO: 3007 - protein, 110 aa, Artificial Sequence
  Synthetic
QSVLTQPASVSGSPGQSITISCTGTSSDVGAYDSVSWYQQHPAKAPKLMIYDVNNRPSGVSNRFSASKSGNTASLTISGLQAEDEAHYYCSSFTTTNTQVFGGGTKLTVL

SEQ ID NO: 3008 - protein, 10 aa, Artificial Sequence
  Synthetic
SSFTTTNTQV

SEQ ID NO: 3009 - protein, 118 aa, Artificial Sequence
  Synthetic
EVQLVQSGAEVKKPGESLKISCKTSGYSFISSWIGWVRQVPGKGLEWMGIIYPGDSDTRYSPSFQGQVTFSADKSISTAYLQWSSLKASDTAIYYCARHIELYSGPMDVWGRGTPVTV

SEQ ID NO: 3010 - protein, 13 aa, Artificial Sequence
  Synthetic
ARHIELYSGPMDV

SEQ ID NO: 3011 - protein, 110 aa, Artificial Sequence
  Synthetic
QSVLTQSPSASGTPGQRVTISCSGSSSNIGGNAVNWFQQLPGTAPKLLIHSNSQRPSGVPDRFSGSKSGTSASLAISGLQPEDEANYYCAAWDDSLNGWVFGGGSKLTVL

SEQ ID NO: 3012 - protein, 11 aa, Artificial Sequence
  Synthetic
AAWDDSLNGWV

SEQ ID NO: 3013 - protein, 131 aa, Artificial Sequence
  Synthetic
EVQLVESGGGLIRPGGSLRVSCAASGFAVSNNYMNWVRQAPGKGLEWISVIYSGGTTYYADSVKGRFTISRDNSKNTLSLQMNSLRVEDTAVYYCAREGDVEGYYGFSSGFSRDRYYFDYWGRGTLVTVSS

SEQ ID NO: 3014 - protein, 25 aa, Artificial Sequence
  Synthetic
AREGDVEGYYGFSSGFSRDRYYFDY

SEQ ID NO: 3015 - protein, 109 aa, Artificial Sequence
  Synthetic
QSVLTQPASVSGSPGQSITISCTGTSNDVGGFNFVSWYQQHPGMAPKLMIFDVTNRPSGVSDRFSGSKSGNTASLTISGLQAQDEADYYCSSFTSTNTRVFGTGTKVTV

SEQ ID NO: 3016 - protein, 10 aa, Artificial Sequence
  Synthetic
SSFTSTNTRV

SEQ ID NO: 3017 - protein, 129 aa, Artificial Sequence
  Synthetic
EVQLVESGGGLFQPGGSLRLSCAASGFSARNNYMSWVRQAPGKGLEWVSVIYSGGTTYYAESVKGRFTISRDNSKNTVYLQVNSLRAEDTAVYYCAREGDVEGLDDSGYSRDRYYFDYWGQGTLVTVSS

SEQ ID NO: 3018 - protein, 23 aa, Artificial Sequence
  Synthetic
AREGDVEGLDDSGYSRDRYYFDY

SEQ ID NO: 3019 - protein, 110 aa, Artificial Sequence
  Synthetic
QSVLTQPASVSGSPGQSITLSCTGTSSDVGAYKFVSWYQQHPGRAPKLMIYDVNNRPSGVSIRFSGSKSGNTASLTISGLQAEDEADYYCSSFTDKNTRVFGTGTKVTVL

SEQ ID NO: 3020 - protein, 10 aa, Artificial Sequence
  Synthetic
SSFTDKNTRV

SEQ ID NO: 3021 - protein, 123 aa, Artificial Sequence
  Synthetic
  misc_feature (87)..(87): Xaa can be any naturally occurring amino acid
QVQLVQSGAEVKKPGASVKVSCKASGYTFTSYYMHWVRQAPGQGLEWMGIIDRIHGASYSQDFQGRATVTSDTSMSTVYLDLRDLRXEDTAMYYCARASTSTSQWTDALSMGPWGQGTLVTVS

SEQ ID NO: 3022 - protein, 18 aa, Artificial Sequence
  Synthetic
ARASTSTSQWTDALSMGP

SEQ ID NO: 3023 - protein, 113 aa, Artificial Sequence
  Synthetic
QSVLTQPPSVSGAPGQRVTISCAGTSTNIGAGYGVHWYQQVPGTAPRLLIYANNNRPSGVPDRFSGSNSGSSASLAITGLQAEDEANYYCQSWDSGLYASGVVFGGGTKLTVL

SEQ ID NO: 3024 - protein, 13 aa, Artificial Sequence
  Synthetic
QSWDSGLYASGVV

SEQ ID NO: 3025 - protein, 125 aa, Artificial Sequence
  Synthetic
QVQLVQSGAELKKPGASVQVSCKSSGYSFSSYFIHWVRQAPGQGLEWMGITDTSSGGSSYTQKFQGRVSVTTDGSTSTVYMELSRLTSEDTAVYFCARATTSTRSWSDALSMNIWGQGTLVTVSS

SEQ ID NO: 3026 - protein, 18 aa, Artificial Sequence
  Synthetic
ARATTSTRSWSDALSMNI

SEQ ID NO: 3027 - protein, 113 aa, Artificial Sequence
  Synthetic
QSVLTQPPSVSGAPGQRVTVSCTGSSSNIGAGYGVHWYQQLPGTAPKLLIYDNTNRPSGVPDRFSGSKSGTSASLAITGLQAEDEADYYCQSWDNGLSGSGVVFGGGTKLTVV

SEQ ID NO: 3028 - protein, 13 aa, Artificial Sequence
  Synthetic
QSWDNGLSGSGVV

SEQ ID NO: 3029 - protein, 131 aa, Artificial Sequence
  Synthetic
EVQLVESGGALIQPGGSLRLSCAGSGFAVRNNYMSWVRQAPGKGLEWVSVIYSGGTTYYADSVKGRFSISRDISKNMVYLQMNSLRVEDTAVYYCAREGDVDGSYGFWSGYSRDRYYFDYWGQGTLVTVSS

SEQ ID NO: 3030 - protein, 25 aa, Artificial Sequence
  Synthetic
AREGDVDGSYGFWSGYSRDRYYFDY

SEQ ID NO: 3031 - protein, 110 aa, Artificial Sequence
  Synthetic
QSALTQPASVSGSPGQSITISCTGTSSDVGAYDYVSWYQQHPGKAPKLMIYDVSDRPSGISDRFSGSKSGNTASLTISGLQVEDEADYYCSSYTTSTTRVFGTGTKVTVL

SEQ ID NO: 3032 - protein, 10 aa, Artificial Sequence
  Synthetic
SSYTTSTTRV

SEQ ID NO: 3033 - protein, 121 aa, Artificial Sequence
  Synthetic
EVQLVESGGGLIQPGGSLRLSCAVSGVAVSTNYMSWVRQAPGQGLEWVSTIYSGDTTYYSDSVKGRFTISRDNSKNTFYLQMNSLRVPDTAVYYCARLGGVFNGFNGSFDYWGQGTLVAVS

SEQ ID NO: 3034 - protein, 16 aa, Artificial Sequence
  Synthetic
ARLGGVFNGFNGSFDY

SEQ ID NO: 3035 - protein, 110 aa, Artificial Sequence
  Synthetic
QSVLTQPASVSGSPGQSITISCIGTSSDFENYNLVSWYQQHPGKAPKVMIYEDTKRPSGVSNRFSGSKSANTASLTISGLQAEDEAEYYCCSYAGASTWVFGGGTRVTVV

SEQ ID NO: 3036 - protein, 10 aa, Artificial Sequence
  Synthetic
CSYAGASTWV

SEQ ID NO: 3037 - protein, 125 aa, Artificial Sequence; identical to SEQ ID NO: 79
  Synthetic

SEQ ID NO: 3038 - protein, 18 aa, Artificial Sequence
  Synthetic
ARASTSTSSWSEALSLGS

SEQ ID NO: 3039 - protein, 113 aa, Artificial Sequence; identical to SEQ ID NO: 80
  Synthetic

SEQ ID NO: 3040 - protein, 13 aa, Artificial Sequence
  Synthetic
QSWDNGLSGSGVV

SEQ ID NO: 3041 - protein, 124 aa, Artificial Sequence
  Synthetic
EVQLLESGGGLVQPGGSLRLSCEASGFTFNNYAMAWVRQAPGKGLEWVSGLSETGVNTYFEDSVKGRFTISRDNSKRTLYLQMNRLRADDSAIYYCAKVGEYCGGDCYRGLDYWGQGTQVTVSS

SEQ ID NO: 3042 - protein, 17 aa, Artificial Sequence
  Synthetic
AKVGEYCGGDCYRGLDY

SEQ ID NO: 3043 - protein, 110 aa, Artificial Sequence
  Synthetic
  misc_feature (4)..(4): Xaa can be any naturally occurring amino acid
QSVXTQEPSLTVSPGGTVTLTCGSSTGDVTSGHYPYWFQQKSGQAPRTLIYQTSIKFSWIPARFSGSLLGGRAALTLSGAQPEDEAEYYCLLSSADGRPVFGGGTKLTVL

SEQ ID NO: 3044 - protein, 10 aa, Artificial Sequence
  Synthetic
LLSSADGRPV

SEQ ID NO: 3045 - protein, 124 aa, Artificial Sequence
  Synthetic
QVQLVESGGGVVQPGRSLRLSCAASGFTFSTYAMHWVRQPPGRGLEWVAVVWFDESNKFYADSVKGRFTVSRDNSKNTLYLQMNSLRAEDTAVYYCATCSERRGSYYGCAFDVWGQGTRVTVSS

SEQ ID NO: 3046 - protein, 17 aa, Artificial Sequence
  Synthetic
ATCSERRGSYYGCAFDV

SEQ ID NO: 3047 - protein, 111 aa, Artificial Sequence
  Synthetic
  misc_feature (2)..(2): Xaa can be any naturally occurring amino acid
QXVLTQSPSASASLGASVKLTCTLSSGHSSNGVAWHQQQPEKGPRFLMKFNTDGSHRKGDGIPDRFSGSSSGAERYLTISGLQSEDEADYYCQTWDTGVWVFGGGTKLTVL

SEQ ID NO: 3048 - protein, 9 aa, Artificial Sequence
  Synthetic
QTWDTGVWV

SEQ ID NO: 3049 - protein, 131 aa, Artificial Sequence; identical to SEQ ID NO: 73
  Synthetic

SEQ ID NO: 3050 - protein, 25 aa, Artificial Sequence
  Synthetic
AREGDVDGNYGFWSGYSRDRYYFDY

SEQ ID NO: 3051 - protein, 110 aa, Artificial Sequence
  Synthetic
  misc_feature (2)..(2): Xaa can be any naturally occurring amino acid
QXVLTQPASVSGSPGQSITISCTGTSSDVGAYNYVAWYQQHPGKAPKLMVYDVSKRPSGVSNRFSGSKSGNTASLTISGLQTEDEGDYYCCSYTTNTTRVFGTGTMLTVL

SEQ ID NO: 3052 - protein, 10 aa, Artificial Sequence
  Synthetic
CSYTTNTTRV

SEQ ID NO: 3053 - protein, 120 aa, Artificial Sequence
  Synthetic
QVQLVQSGAEVKKPGASVKVSCKASGYTFTSYGISWVRQAPGQGLEWMGWISTYSADMKYAQKFQGRVTMTTDTSTSTAYMELRSLRSDDTAVYYCARKQWLIMGDLGYWGQGTLVTVSS

SEQ ID NO: 3054 - protein, 13 aa, Artificial Sequence
  Synthetic
ARKQWLIMGDLGY

SEQ ID NO: 3055 - protein, 108 aa, Artificial Sequence
  Synthetic
NFMLTQPHSVSESPGKTVTISCTGSSGSIASNYVQWYQQRPGSAPTTVIYEDDQRPSGVPDRFSGSIDSSSNSASLTISGLKTEDEADYYCQSYDGSIVFGGGTKLTV

SEQ ID NO: 3056 - protein, 8 aa, Artificial Sequence
  Synthetic
QSYDGSIV

SEQ ID NO: 3057 - protein, 129 aa, Artificial Sequence
  Synthetic
EVQLVQSGAEVKKPGESLKISCKGSGYTFTSYWIDWVRQTPGKGLEWMGTIYPRDSDTRYSPSFQGQVTISADKSLTTAYLQWGSLRASDTAMYYCARRALGDYYDRHGHFHRLGFDYWGQGTPVTVSS

SEQ ID NO: 3058 - protein, 22 aa, Artificial Sequence
  Synthetic
ARRALGDYYDRHGHFHRLGFDY

SEQ ID NO: 3059 - protein, 109 aa, Artificial Sequence
  Synthetic
SYVLTQPPSVSVAPGQTAKITCGGNDIGRNNVHWYQQRPGQAPVLVVYDDSDRPSGIPERFSGSNSGNTATLTISRVEAGDEADYYCQVWDSSSEHAWVFGGGTKLTVL

SEQ ID NO: 3060 - protein, 12 aa, Artificial Sequence
  Synthetic
QVWDSSSEHAWV

SEQ ID NO: 3061 - protein, 122 aa, Artificial Sequence
  Synthetic
EVQLVESGGGLVKPGGSLRLTCAASGFTFSTYSMNWVRQAPGKGLEWVSSISSSNSYIYYADSVKGRFTISRDNAKNSLYLQMNSLRAEDTAVYYCARERGYYGGKTPPFLGGQGTLVTVSS

SEQ ID NO: 3062 - protein, 15 aa, Artificial Sequence
  Synthetic
ARERGYYGGKTPPFL

SEQ ID NO: 3063 - protein, 111 aa, Artificial Sequence; identical to SEQ ID NO: 78
  Synthetic

SEQ ID NO: 3064 - protein, 10 aa, Artificial Sequence
  Synthetic
QSYDSSNYWV

SEQ ID NO: 3065 - protein, 123 aa, Artificial Sequence
  Synthetic
QVQLQESGPGLVKPSQTLSLTCGVSGDFISSGDFYWSWIRQHPAKGLEWIGCIFDSGSIYYHPSLKGRVSISVDTSKNQFSLKLTSVTAADTAVYYCARGGGGNPFPGFLSPWGQGIRVTVSS

SEQ ID NO: 3066 - protein, 15 aa, Artificial Sequence
  Synthetic
ARGGGGNPFPGFLSP

SEQ ID NO: 3067 - protein, 110 aa, Artificial Sequence
  Synthetic
SYVLTQPPSVSVAPGQTAKINCGGDYIGSKNVHWYQQKPGQAPVLVVYDDSDRPSGVPERFSGSNSGNTAILTISRVEAGDEADYYCQVWDSTTGHPNWVFGGGTKVTVL

SEQ ID NO: 3068 - protein, 13 aa, Artificial Sequence
  Synthetic
QVWDSTTGHPNWV

SEQ ID NO: 3069 - protein, 125 aa, Artificial Sequence
  Synthetic
QVQLVQSGAEVKKPGASVKVSCQASGYIFTNYAITWVRQAPGQGLEWMGWISAYNGYTNYPQKFQDRVTMTIDTSTNTVYMDLRSLRFDDTAVYYCARGLYGGVKYYFYYAMDVWGQGTTVTVSS

SEQ ID NO: 3070 - protein, 18 aa, Artificial Sequence
  Synthetic
ARGLYGGVKYYFYYAMDV

SEQ ID NO: 3071 - protein, 112 aa, Artificial Sequence
  Synthetic
QSVLTQPPSVSGAPGQRVTISCTGSSSNIGAGYDVHWYQQLPGTAPKLLIYDSSHRPSGVPDRFSGSKSGTSASLAITGLQAADEADYYCQSYDSSLSSSGVFGGGTKLTVL

SEQ ID NO: 3072 - protein, 12 aa, Artificial Sequence
  Synthetic
QSYDSSLSSSGV

SEQ ID NO: 3073 - protein, 124 aa, Artificial Sequence
  Synthetic
EVQLVESGGQLVQPGGSLRLSCSASGFTFSDYAMHWVRQAPGKGLEYLSAISSYGGSPYYTDSVKGRFTISRDNSKNTLFLQMNSLRPEDTALYYCVREGLGSRSSSTGYFDLWGRGTLVTVSS

SEQ ID NO: 3074 - protein, 17 aa, Artificial Sequence
  Synthetic
VREGLGSRSSSTGYFDL

SEQ ID NO: 3075 - protein, 108 aa, Artificial Sequence
  Synthetic
SYVLTQPPSVSVAPGKTARITCGGDNIGSKNVHWYHQKPGQAPLLVIYYDSDRPSGIPERFSGSNSGNTATLTISRVEVGDEADYYCQVWDFSSPHVVFGGGTKLTVL

SEQ ID NO: 3076 - protein, 11 aa, Artificial Sequence
  Synthetic
QVWDFSSPHVV

SEQ ID NO: 3077 - protein, 119 aa, Artificial Sequence
  Synthetic
QVQLQQWGAGLLKPSETLSLTCAVYGGSFSSYYWSWVRQTPGKGLEWIGEINHSGSTNYKPSLASRVSISIDMSKKQFSLKLNSVTAADTAVYYCASLYMVTYDVASYWGQGTLVTVSS

SEQ ID NO: 3078 - protein, 13 aa, Artificial Sequence
  Synthetic
ASLYMVTYDVASY

SEQ ID NO: 3079 - protein, 111 aa, Artificial Sequence
  Synthetic
QSVLTQPPSVSAAPGQNVTISCSGSSSNIGNNFVFWYQQLPGTAPNLLIYENNKRPSGIPDRFSGSKSGTSATLGITGLQTGDEADYYCATWDSRLNAAWVFGGGTKVTVL

SEQ ID NO: 3080 - protein, 12 aa, Artificial Sequence
  Synthetic
ATWDSRLNAAWV

SEQ ID NO: 3081 - protein, 121 aa, Artificial Sequence; identical to SEQ ID NO: 111
  Synthetic

SEQ ID NO: 3082 - protein, 12 aa, Artificial Sequence
  Synthetic
TSQLWLRGPGDY

SEQ ID NO: 3083 - protein, 111 aa, Artificial Sequence; identical to SEQ ID NO: 112
  Synthetic

SEQ ID NO: 3084 - protein, 10 aa, Artificial Sequence
  Synthetic
QSYDSGVNWV

SEQ ID NO: 3085 - protein, 121 aa, Artificial Sequence
  Synthetic
EVQLVQSGAEVKKPGESLRISCKASESSFTSYWISWVRQMPGQGLEWMGRIDPSDSYTVYSPSFHGHVTISADKSINTAFLNWSSLKASDTAMYFCARLTPDSSGSYYRGWGQGTLVTVSS

SEQ ID NO: 3086 - protein, 14 aa, Artificial Sequence
  Synthetic
ARLTPDSSGSYYRG

SEQ ID NO: 3087 - protein, 110 aa, Artificial Sequence
  Synthetic
QSVLTQPASVSGSPGQSITISCTGTSSDVGGYNYVSWYQQHPGKVPKLMIYDVSHRPSGVSIRFSGSKSGNTASLTISGLQGEDEADYYCTSYTNRNTVVFGGGTKLTVL

SEQ ID NO: 3088 - protein, 10 aa, Artificial Sequence
  Synthetic
TSYTNRNTVV

SEQ ID NO: 3089 - protein, 119 aa, Artificial Sequence
  Synthetic
EVQLVQSGTEVKKPGESLKISCKASGYSFTTYWIGWVRQMPGKGLEWMGIIHPGNSETRYSPSFQGQVTISADKSITTAYLERDRLEASDTATYYCARLPMIWVGMDVWGHGTMVIVSS

SEQ ID NO: 3090 - protein, 12 aa, Artificial Sequence
  Synthetic
ARLPMIWVGMDV

SEQ ID NO: 3091 - protein, 110 aa, Artificial Sequence
  Synthetic
NFMLTQPHSVSESPGKTVTISCTGSGGSIATNYVQWYQQRPGSAPTTVIYEDKQRPSGVPNRFSGSIDSSSNSASLTISGLKTEDEADYYCQSSPGSNHGVFGGGTKLTV

SEQ ID NO: 3092 - protein, 10 aa, Artificial Sequence
  Synthetic
QSSPGSNHGV

SEQ ID NO: 3093 - protein, 130 aa, Artificial Sequence
  Synthetic
QVQLVQSGPEVKKPGASVKVSCKASGYIFTDYSIHWVRQAPGQGLEWMGWINPNSGGGNSAQIFKGRATMARDTSITTVYMDLSGLRSDDTAVYYCARGPLFHKVVYESSSGFHDGLDFWGQGTVVIVAS

SEQ ID NO: 3094 - protein, 23 aa, Artificial Sequence
  Synthetic
ARGPLFHKVVYESSSGFHDGLDF

SEQ ID NO: 3095 - protein, 109 aa, Artificial Sequence
  Synthetic
HSVLTQPASVSGSPGQSVTISCTGTSSDVGGYNFLSWYQQHPGKAPKLLLYEVINRPSGVSDRFSGSKSGNTASLTISGLQAEDEADYYCNSYTSNFTWVFGGGTHLTV

SEQ ID NO: 3096 - protein, 10 aa, Artificial Sequence
  Synthetic
NSYTSNFTWV

SEQ ID NO: 3097 - protein, 129 aa, Artificial Sequence
  Synthetic
EVQLVQSGAEVKKPGESLKISCKGSGYTFTSYWIGWVRQKPGKGLEWMGIINPSGSDIRNSPSFQGQVNISADKSISTAYLQWSSLKASDTAMYYCARRALGDYYDRTGYYHRLGFDSWGLGTLVTVSS

SEQ ID NO: 3098 - protein, 22 aa, Artificial Sequence
  Synthetic
ARRALGDYYDRTGYYHRLGFDS

SEQ ID NO: 3099 - protein, 109 aa, Artificial Sequence
  Synthetic
SYVLTQPPSVSVAPGQTARISCGGNNIGSKSVPWYQQKPGQAPVLVVYGDSDRPSGIPERFSGSNSGNTATLTISRVEAGDEADYYCQVWDGTGDHLWVFGGGTKLTVL

SEQ ID NO: 3100 - protein, 12 aa, Artificial Sequence
  Synthetic
QVWDGTGDHLWV

SEQ ID NO: 3101 - protein, 120 aa, Artificial Sequence
  Synthetic
QVQLVQSGAELVKPGASVKLSCKASGYTFTSYLMHWVKQRPGRGLEWIGRIDPNSGGTKYNEKFKSKATLTVDKPSSTAYMQLSSLTSEDSAVYFCARHDYYGSYYFDYWGQGTTLTVSS

SEQ ID NO: 3102 - protein, 13 aa, Artificial Sequence
  Synthetic
ARHDYYGSYYFDY

SEQ ID NO: 3103 - protein, 109 aa, Artificial Sequence
  Synthetic
QSVLTQEPSFSVSPGGTVTLTCALSSGSVSTSHYPSWYQQTPGQAPRTLIFRTNTRSFGVPARFSGAIIGNKAALTISGAQADDESDYFCMLYLGDNMIFGGGTKLTVL

SEQ ID NO: 3104 - protein, 9 aa, Artificial Sequence
  Synthetic
MLYLGDNMI

SEQ ID NO: 3105 - protein, 120 aa, Artificial Sequence
  Synthetic
EVQLLESGGHLVQPGGSLRLSCAATGFTFSTYPMTWVRKAPGKGLEWVSAISDNGGSTYYADSVRGRFTISRDNSKNTVYLQMDRLSAEDTAAYYCAKARTGWFLGFDYWGQGTLVTVSS

SEQ ID NO: 3106 - protein, 13 aa, Artificial Sequence
  Synthetic
AKARTGWFLGFDY

SEQ ID NO: 3107 - protein, 111 aa, Artificial Sequence
  Synthetic
NFMLTQPHSVSESPGKTVTISCTGSSGSIASNYVQWYQQRPGSAPTTLIYEDNQRPSGVPDRFSGSIDSSSNSASLTISGLKTEDEADYYCQSFASNTPWVFGGGTKLTVL

SEQ ID NO: 3108 - protein, 10 aa, Artificial Sequence
  Synthetic
QSFASNTPWV

SEQ ID NO: 3109 - protein, 135 aa, Artificial Sequence
  Synthetic
EVQLVESGGGLAQPGGSLRLSCEASGFTFDSYSMNWVRQAPGKGLEWVSYISSSELTMFYADSVKGRFTISRDNVKNSLHLQMNSLRAEDTAVYYCARGGYDFVRGSHRLWPSQGAEYFYYMDVWGKGTPVTVSS

SEQ ID NO: 3110 - protein, 28 aa, Artificial Sequence
  Synthetic
ARGGYDFVRGSHRLWPSQGAEYFYYMDV

SEQ ID NO: 3111 - protein, 110 aa, Artificial Sequence
  Synthetic
QSVLTQPASVSGSPGQSLTVSCTGTSSDVGGYDYVTWYQQHPDKAPKLIIYDVSNRPSGISNRFSGSKSGNTASLTISGLQAEDEADYYCSSYTNSKTLEFGGGTKVTVL

SEQ ID NO: 3112 - protein, 10 aa, Artificial Sequence
  Synthetic
SSYTNSKTLE

SEQ ID NO: 3113 - protein, 129 aa, Artificial Sequence; identical to SEQ ID NO: 125
  Synthetic

SEQ ID NO: 3114 - protein, 20 aa, Artificial Sequence
  Synthetic
TTDADYSDSSGYYVTYYFEY

SEQ ID NO: 3115 - protein, 111 aa, Artificial Sequence
  Synthetic
  misc_feature (2)..(2): Xaa can be any naturally occurring amino acid
QXVLTQPRSVSGSPGQSVTISCTGSNSDVGGYNYVSWYQQHPGKAPKLVIYDVSLRPSGVPDRFSGSKSGITASLTISGLQPEDEAHYYCCSFAGTYTPWVFGGGTRLTVL

SEQ ID NO: 3116 - protein, 11 aa, Artificial Sequence
  Synthetic
CSFAGTYTPWV

SEQ ID NO: 3117 - protein, 123 aa, Artificial Sequence; identical to SEQ ID NO: 105
  Synthetic

SEQ ID NO: 3118 - protein, 17 aa, Artificial Sequence
  Synthetic
ARDLRKDDGYSYGAFDY

SEQ ID NO: 3119 - protein, 110 aa, Artificial Sequence
  Synthetic
QSVLTQPASVSGSPGQSITISCSGTSSDVGAHNYVSWYQQYPGKAPKLMIFDVTDRPSGVSNRFSGSKSGNTASLTISGLQAEDEADYYCTSYTTNRSWVFGGGTKVTVL

SEQ ID NO: 3120 - protein, 10 aa, Artificial Sequence
  Synthetic
TSYTTNRSWV

SEQ ID NO: 3121 - protein, 122 aa, Artificial Sequence
  Synthetic
EVQLVESGGGLIQPGGSLRLSCAVSGFTVSSNYMAWVRQAPGKRLEWVSAIYSGDSTYYTDSVKGRFTISKDNSKTTLYLQMNSLRAEDTAIYYCARLGGVYNGYNGSFDYWGQGTLVTVSS

SEQ ID NO: 3122 - protein, 16 aa, Artificial Sequence
  Synthetic
ARLGGVYNGYNGSFDY

SEQ ID NO: 3123 - protein, 110 aa, Artificial Sequence
  Synthetic
QSVLTQPASVSGSPGQSITISCTGSSSDVGTYNLVSWYQQHPGKAPKLMIYEDSKRPSGVSDRFSGSKSANTASLTISGLQAGDEANYYCCSYAGRSTWVFGGGTKVTVL

SEQ ID NO: 3124 - protein, 10 aa, Artificial Sequence
  Synthetic
CSYAGRSTWV

SEQ ID NO: 3125 - protein, 122 aa, Artificial Sequence
  Synthetic
QVQLVESGGGVVQPGRSLRLSCAASGFAFSTYGMHWVRQAPGKGLEWVAVIWYDGSNKYYADSVKGRFTISRDNSKNTLYLQLNSLRGEDTAVYYCAKQGYGYAYPTYFDYWGQGSLVTVSS

SEQ ID NO: 3126 - protein, 15 aa, Artificial Sequence
  Synthetic
AKQGYGYAYPTYFDY

SEQ ID NO: 3127 - protein, 108 aa, Artificial Sequence
  Synthetic
SYVLTQPPSVSVAPGQTARITCGGNNIETKRVHWYQKKPGQAPVLVVYDDSDRPSEIPERFSGSHSGNTATLTIIMVEAGDEADYYCQVWDSSSDNPVFGGGTKLTVL

SEQ ID NO: 3128 - protein, 11 aa, Artificial Sequence
  Synthetic
QVWDSSSDNPV

SEQ ID NO: 3129 - protein, 135 aa, Artificial Sequence
  Synthetic
EVQLVESGGGLAQPGGSLRLSCEASGFTFDSYSMNWVRQAPGKGLEWVSYISSSESTIFYADSVKGRFTISRDNVKNSLHLQMNSLRAEDTAVYYCARGGYDFVRGSYRLWPSQGAEYFYYMDVWGKGTPVTVSS

SEQ ID NO: 3130 - protein, 28 aa, Artificial Sequence
  Synthetic
ARGGYDFVRGSYRLWPSQGAEYFYYMDV

SEQ ID NO: 3131 - protein, 110 aa, Artificial Sequence
  Synthetic
QSVLTQPASVSGSPGQSLTVSCTGTSSDVGGYDYVSWYQQHPGKAPKLIIYDVSNRPSGISNRFSGSKSGNTASLTISGLQAEDEADYYCSSYTNSKTLEFGGGTKLTVL

SEQ ID NO: 3132 - protein, 10 aa, Artificial Sequence
  Synthetic
SSYTNSKTLE

SEQ ID NO: 3133 - protein, 129 aa, Artificial Sequence
  Synthetic
QVQLVQSGGEVKKPGASVKVSCRTSGYNFNNYYIHWVRQAPGQGLEWMGAIKPSDNITNYTQKLQGRVTMTRDMATTTVYMELSSLTSEDTAIYYCSRVGCGGPDCYFWRPLGNGMDVWGLGTTVTVSS

SEQ ID NO: 3134 - protein, 22 aa, Artificial Sequence
  Synthetic
SRVGCGGPDCYFWRPLGNGMDV

SEQ ID NO: 3135 - protein, 111 aa, Artificial Sequence
  Synthetic
QSVLTQEPSLTVSPGGTVTLTCASSTGAVTSNYYPNWLQQKPGQAPRSLIHSTNNKHSWTPARFSGSLIGGKAALTLSGAQPEDEAEYYCLLYFGGGHLGMFGGGTKLTVL

SEQ ID NO: 3136 - protein, 11 aa, Artificial Sequence
  Synthetic
LLYFGGGHLGM

SEQ ID NO: 3137 - protein, 126 aa, Artificial Sequence
  Synthetic
EVQLLESGGGLVQPGGSLRLSCTTSGFTFSTSGMTWVRQAPGKGLEWVSTISRSDDRASYADSVKGRFTISRDNSKNTLYMQMNSLSAEDTAVYYCVKDTYYFDSSSHGINWFDPWGQGTLVSVSS

SEQ ID NO: 3138 - protein, 19 aa, Artificial Sequence
  Synthetic
VKDTYYFDSSSHGINWFDP

SEQ ID NO: 3139 - protein, 111 aa, Artificial Sequence
  Synthetic
QSVLTQPPSVSGAPGQRVTISCTGSSSNIGAGYDVHWYQQLPGTTPKLLIYVNNNRPSGVPDRFSGSKSGTSASLAITGLQAEDEADYYCQSYDTSLSRYVFGTGTKVTVL

SEQ ID NO: 3140 - protein, 11 aa, Artificial Sequence
  Synthetic
QSYDTSLSRYV

SEQ ID NO: 3141 - protein, 131 aa, Artificial Sequence; identical to SEQ ID NO: 3013
  Synthetic

SEQ ID NO: 3142 - protein, 25 aa, Artificial Sequence
  Synthetic
AREGDVEGYYGFSSGFSRDRYYFDY

SEQ ID NO: 3143 - protein, 109 aa, Artificial Sequence
  Synthetic
QSALTQPASVSGSPGQSITISCTGTSNDVGGFNFVSWYQQHPGMAPKLMIFDVTNRPSGVSDRFSGSKSGNTASLTISGLQAQDEADYYCSSFTSTNTRVFGTGTKVTV

SEQ ID NO: 3144 - protein, 10 aa, Artificial Sequence
  Synthetic
SSFTSTNTRV

SEQ ID NO: 3145 - protein, 130 aa, Artificial Sequence
  Synthetic
QVQLVQSGAEVKRPGASVKLSCKASGYIFTDYSIHWVRQAPGQGLEWMGWVNPNSGGGNSAQKFMDWVTMARDTSITTVYMELSRLRSDDTAVYYCARGPLFHKLVYDSWSGYHDGFDIWGQGTMVTVSS

SEQ ID NO: 3146 - protein, 23 aa, Artificial Sequence
  Synthetic
ARGPLFHKLVYDSWSGYHDGFDI

SEQ ID NO: 3147 - protein, 110 aa, Artificial Sequence
  Synthetic
QSVLTQPASVSGSPGQSITISCTGTSSDVGAYKFVSWYQQHPGKAPQLIIYEVSNRPSGVSNRFSGSKSGNTASLTISGLQAEDEADYYCSSYTNASTWVFGGGTELTVL

SEQ ID NO: 3148 - protein, 10 aa, Artificial Sequence
  Synthetic
SSYTNASTWV

SEQ ID NO: 3149 - protein, 130 aa, Artificial Sequence
  Synthetic
QVQLVQSGAEVKKPGASIKVSCKASGYTFTDYSMHWVRQAPGQGLEWMGWINPNSGGTKYAQKFQGWVTMTRDMSITTVYMELTRLRSDATAVFYCARGPLFHKLVYDSWTGYHDGFDIWGQGTMVTVSS

SEQ ID NO: 3150 - protein, 23 aa, Artificial Sequence
  Synthetic
ARGPLFHKLVYDSWTGYHDGFDI

SEQ ID NO: 3151 - protein, 110 aa, Artificial Sequence
  Synthetic
QSVLTQPASVSGSPGQSITISCTGTSSDVGGYNYVSWYQHYPGKAPKLMIYEVTHRPSGVSNRFSGSKSGNTASLTISGLQAEDEADYYCSSSTNSSTWVFGGGTKMTVL

SEQ ID NO: 3152 - protein, 10 aa, Artificial Sequence
  Synthetic
SSSTNSSTWV

SEQ ID NO: 3153 - protein, 122 aa, Artificial Sequence
  Synthetic
QVQLVQSGAGVRKPGASVKVSCKASGYTFTGYYMHWVRQAPGQGLEWMGWINPNNGDTGYAQKFQGWVTMTRDTSISTAYMELSRLTSADTAVYYCVRGAVVYGTAGWFDPWGQGTLVTVSS

SEQ ID NO: 3154 - protein, 15 aa, Artificial Sequence
  Synthetic
VRGAVVYGTAGWFDP

SEQ ID NO: 3155 - protein, 106 aa, Artificial Sequence
  Synthetic
SYVLTQPPSVSVAPGQTARITCGADNIGSKNVHWYQQKAAQAPVLVVYDDSDRPSGIPERFSGSNSGNTATLTISRVEAGDEADYYCQVWDSYSNWVFGGGAKLTV

SEQ ID NO: 3156 - protein, 10 aa, Artificial Sequence
  Synthetic
QVWDSYSNWV

SEQ ID NO: 3157 - protein, 127 aa, Artificial Sequence
  Synthetic
QVQLVQSGAEVKKPGASVKVSCKASGYIFSRYDMHWVRQAPGQRLEWMGWINAGNGNTRYSQKFQGRVTITRDTSATTVYMDLTSLRSEDTAVYYCARDPSYCSDERCSRRDWFDPWGQGTLVTVSS

SEQ ID NO: 3158 - protein, 20 aa, Artificial Sequence
  Synthetic
ARDPSYCSDERCSRRDWFDP

SEQ ID NO: 3159 - protein, 109 aa, Artificial Sequence
  Synthetic
SYVLTQPPSVSVAPGQTARIACGGDTIGSKNVHWYQQKPGQAPVLVVYDDSDRPSGIPERFSGSNSGNTATLSISRVEAGDEADYFCQVWDSGSDHFWVFGGRDQADRP

SEQ ID NO: 3160 - protein, 12 aa, Artificial Sequence
  Synthetic
QVWDSGSDHFWV

SEQ ID NO: 3161 - protein, 127 aa, Artificial Sequence
  Synthetic
QVQLVQSGAEVKKPGASVKVSCKASGYNFTSYYMYWVRQAPGQGLEWMGIINPSGGSTSYAQKFQGRVTMTRDTSTSTVYMELSSLRSEDTAVYYCARDRLKQPNPGLRMYNWFAPWGQGTLVTVSS

SEQ ID NO: 3162 - protein, 20 aa, Artificial Sequence
  Synthetic
ARDRLKQPNPGLRMYNWFAP

SEQ ID NO: 3163 - protein, 116 aa, Artificial Sequence
  Synthetic
QSVLTQPPSASASLGASVTLTCTLSSGYSNYKVDWYQQRPGKGPRFVMRVGTGGIVGSKGDGIPDRFSVLGSGLNRYLTIKNIQEEDESDYHCGADHGSGSNFVWVFGGGTKLTVL

SEQ ID NO: 3164 - protein, 13 aa, Artificial Sequence
  Synthetic
GADHGSGSNFVWV

SEQ ID NO: 3165 - protein, 125 aa, Artificial Sequence
  Synthetic
QVQLVQSGAEAKKPGASVKVSCKTSGYTFTNYFMHWVRQAPGQGPEWMGIIDSSDGGASYAQKFQGRVTMTRDTSTSTVYMELRSLKFEDTAVYYCARASTSTTSWSDALSLGSWGQGTLVTVSS

SEQ ID NO: 3166 - protein, 18 aa, Artificial Sequence
  Synthetic
ARASTSTTSWSDALSLGS

SEQ ID NO: 3167 - protein, 113 aa, Artificial Sequence
  Synthetic
QSVLTQPPSVSGAPGQRVTISCTGSSSNIGGGSVVHWYQQLPGTAPKLLIYANSNRPSGVPDRFSGSKSGTSASLAIAGLQAEDEADYYCQSWDNGLSASGVVFGGGTKLTVL

SEQ ID NO: 3168 - protein, 13 aa, Artificial Sequence
  Synthetic
QSWDNGLSASGVV

SEQ ID NO: 3169 - protein, 124 aa, Artificial Sequence
  Synthetic
QVQLVQSGAEVKKPGSSVKVSCKASGGSFSSSAINWVRQAPGQGLEWMGGIIPMFGTANYAQNFQGRVTITADGSTSTAYMELNNLKSEDTAVYYCAIDPSAWYPSRSPRLDSWGQGTLVTVSS

SEQ ID NO: 3170 - protein, 17 aa, Artificial Sequence
  Synthetic
AIDPSAWYPSRSPRLDS

SEQ ID NO: 3171 - protein, 108 aa, Artificial Sequence
  Synthetic
QSVLTQPRSVSGSPGQAVTISCTGTSSAVGVYNHLSWYQQHPGKAPKVMIYDIYKRPSGVPDRFSGSKSGNTASLTISGLQSEDEADYYCCSYAGNYTWGGGTKLTVL

SEQ ID NO: 3172 - skipped

SEQ ID NO: 3173 - protein, 122 aa, Artificial Sequence
  Synthetic
EVQLVESGGGLVKPGGSLRLTCAASGFTFSTYSMNWVRQAPGKGLEWVSSISSSSSYIYYADSVKGRFTISRDNAKNSLYLQMNSLRAEDTAVYYCARERGYYGGKTPPFLGGQGTLVTVSS

SEQ ID NO: 3174 - protein, 15 aa, Artificial Sequence
  Synthetic
ARERGYYGGKTPPFL

SEQ ID NO: 3175 - protein, 111 aa, Artificial Sequence; identical to SEQ ID NO: 78
  Synthetic

SEQ ID NO: 3176 - protein, 10 aa, Artificial Sequence
  Synthetic
QSYDSSNYWV

SEQ ID NO: 3177 - protein, 115 aa, Artificial Sequence
  Synthetic
EVQLVESGGGLVKPGGSLTLSCAASGFSFFSYNMNWVRQAPGKGLEWVSSIGSTTKYIYYADSVKGRFTISRDNAKNLLYLQMNSLRAEDTAVYYCVRERYGDNWGQGTLVTVSS

SEQ ID NO: 3178 - protein, 8 aa, Artificial Sequence
  Synthetic
VRERYGDN

SEQ ID NO: 3179 - protein, 109 aa, Artificial Sequence
  Synthetic
QSVLTQSPSASASLGASVKLTCTLSSGHSSYAIAWHQQQPEKGPRFLMSLNSDGSHSKGDGIPDRFSGSSSGPERYLTISSLQSEDEADYYCQTWGLWVFGGGTKLTVL

SEQ ID NO: 3180 - protein, 7 aa, Artificial Sequence
  Synthetic
QTWGLWV

SEQ ID NO: 3181 - protein, 130 aa, Artificial Sequence
  Synthetic
EVQLLESGGDLVQPGGSLRLSCAASGFTFSNYAMSWVRQAPGKGLEWVSAISGSGGNTYYADSVKGRFTISRDNSKNTLYLQMNSLRAEDTAVYYCAKAVHYGGNSDRRFSEPSAPFDYWGQGTLVTVSS

SEQ ID NO: 3182 - protein, 23 aa, Artificial Sequence
  Synthetic
AKAVHYGGNSDRRFSEPSAPFDY

SEQ ID NO: 3183 - protein, 111 aa, Artificial Sequence
  Synthetic
QSVLTQPASVSGSPGQSITISCTGTSSDVGSYNLVSWYQQHPGKAPKLMIYEGSKRPSGVSNRFSGSKSGNTASLTISGLQAEDEADYYCCSYAGSSTPYVFGTGTKVTVL

SEQ ID NO: 3184 - protein, 11 aa, Artificial Sequence
  Synthetic
CSYAGSSTPYV

SEQ ID NO: 3185 - protein, 123 aa, Artificial Sequence
  Synthetic
EVQLLESGGGLVQPGGSLRLSCAASGFSFSDYAMYWVRQAPGKGLEWVSTISGSGANTYYADSVKGRFTISRDNSKNTLSLQMNSLRGEDTAVYYCAIPFTIFGVVPDWCFDFWGRGTLVTVS

SEQ ID NO: 3186 - protein, 17 aa, Artificial Sequence
  Synthetic
AIPFTIFGVVPDWCFDF

SEQ ID NO: 3187 - protein, 109 aa, Artificial Sequence
  Synthetic
QSVLTQPRSVSGSPGQSVTISCTGTSSDVGAYNYVSWYQQHPGKAPKLMIYNVSERPSGVPDRFSGSKSGNTASLTISGLQADDEADYYCCSYAGNFWVFGTGTKLTVL

SEQ ID NO: 3188 - protein, 9 aa, Artificial Sequence
  Synthetic
CSYAGNFWV

SEQ ID NO: 3189 - protein, 132 aa, Artificial Sequence
  Synthetic
QVQLVESGGGVVQPGRSLRLSCAASGFTFSSYAMYWVRQAPGKGLEWVAVISFDGRNIYYADSVKGRFSISRENSKSTLFLQMNSLRLDDTAMYYCARDCGPAQPPLVEADDYFYFYGMDVWGQGTTVTVSS

SEQ ID NO: 3190 - protein, 25 aa, Artificial Sequence
  Synthetic
ARDCGPAQPPLVEADDYFYFYGMDV

SEQ ID NO: 3191 - protein, 108 aa, Artificial Sequence
  Synthetic
SYVLTQPPSVSVSPGQTARITCSGDAFPKQYGYWYQQKPGQAPVLVIYKDSERPSGIPERFSGSSSGTTVTLTISGVQAEDEADYYCQSADSSGTRRVFGGGTKLTVL

SEQ ID NO: 3192 - protein, 11 aa, Artificial Sequence
  Synthetic
QSADSSGTRRV

SEQ ID NO: 3193 - protein, 124 aa, Artificial Sequence
  Synthetic
QVQLVESGGGVVQPGRSLRLSCAASGFTFSSYGIHWVRQAPGKGLEWVAVISYDGTIKSYAGSVKGRFTISKDNSKNTLYLQMNSLRAEDTAVYYCAKDPFPLAVAGTGYFDYWGQGTLVTVSS

SEQ ID NO: 3194 - protein, 17 aa, Artificial Sequence
  Synthetic
AKDPFPLAVAGTGYFDY

SEQ ID NO: 3195 - protein, 108 aa, Artificial Sequence
  Synthetic
SYVLTQPPSVSVAPGQTARITCGGNDIGSKNVHWYQQKPGQAPVLVVYDDSDRPSGIPERFSGSNSGNTATLTISRVEAGDEADYYCQVWDSSGDFWVFGGGTKLTVL

SEQ ID NO: 3196 - protein, 11 aa, Artificial Sequence
  Synthetic
QVWDSSGDFWV

SEQ ID NO: 3197 - protein, 123 aa, Artificial Sequence
  Synthetic
QVQLVESGGGVVQPGRSLRLSCEASGFTFSHYGIHWVRQAPGKGLEWVAVMSYDGSDEYYADSVKGRFTISRDNSRNTVYLQMNSLRTDDTAVYYCAKVGAPYYYYYYGMDVWGQGTPVTVSS

SEQ ID NO: 3198 - protein, 16 aa, Artificial Sequence
  Synthetic
AKVGAPYYYYYYGMDV

SEQ ID NO: 3199 - protein, 111 aa, Artificial Sequence
  Synthetic
QSVLTQPASVSGSPGQSITISCTGTSSDVGAYNYVSWYQQYPGKAPKLMIYEVSDRPSGVSNRFSGSKSGNTASLTISGLQAEDEADYYCSSYISSTTSWVFGGGTKLTVL

SEQ ID NO: 3200 - protein, 11 aa, Artificial Sequence
  Synthetic
SSYISSTTSWV

SEQ ID NO: 3201 - protein, 130 aa, Artificial Sequence
  Synthetic
QVQLVESGGGVVQTGRSVRLSCAASGFTFTNYGMHWVRQAPGKGLEWVAVIWYDGSNKYYADSVRGRFTISRDNSKNTLFLQMNSLRAEDTAVYYCARDFIPEDLIVVDVTGGAYGMDVWGQGTTVTVSS

SEQ ID NO: 3202 - protein, 23 aa, Artificial Sequence
  Synthetic
ARDFIPEDLIVVDVTGGAYGMDV

SEQ ID NO: 3203 - protein, 110 aa, Artificial Sequence
  Synthetic
QSVLTQPASVSGSPGQSITISCTGSSSDIGGYNFVSWYQQHPGKAPKLMIYDVSNRPPGVSYRFSGSKSGNTASLTISGLQAEDEADYYCNSYTGSTTPLFGGGTKLTVL

SEQ ID NO: 3204 - protein, 10 aa, Artificial Sequence
  Synthetic
NSYTGSTTPL

SEQ ID NO: 3205 - protein, 124 aa, Artificial Sequence
  Synthetic
QVQLVESGGGVVQPGRSLRLSCVASGFSFSTYGMHWVRQAPGKGLEWVALIWSDGSNKYYGDAAEGRFTISRDNSNNTLYLQMNNLRAEDTALYYCARDHSSSSFVYYYYMDVWGKGTTVTVSS

SEQ ID NO: 3206 - protein, 17 aa, Artificial Sequence
  Synthetic
ARDHSSSSFVYYYYMDV

SEQ ID NO: 3207 - protein, 109 aa, Artificial Sequence
  Synthetic
QSVLTQPRSVSGSPGQSVTISCTGTSSDIGGYNYVSWYQQHPDKAPKFIIFDVSKRPSGVPDRFSGSKSGNTASLTISGLQAEDEADYYCCSYAGPYPYVFGTGTKVTV

SEQ ID NO: 3208 - protein, 10 aa, Artificial Sequence
  Synthetic
CSYAGPYPYV

SEQ ID NO: 3209 - protein, 131 aa, Artificial Sequence
  Synthetic
EVQLVESGGGLIQPGGSLRLSCAASGFIVSNNYMSWVRQAPGKGLDWVSVIYSGGTTYYADSVKGRFTISRDNSKNTLYLQMNSLRAEDTAVYYCAREGDVEGYHDSWSGYSRDRYYFDYWGQGTLVTVSS

SEQ ID NO: 3210 - protein, 25 aa, Artificial Sequence
  Synthetic
AREGDVEGYHDSWSGYSRDRYYFDY

SEQ ID NO: 3211 - protein, 110 aa, Artificial Sequence
  Synthetic
QSALTQPASVSGSPGQSITISCTGSSSDVGGYNFVSWYQQHPGRAPKLMIYDVSNRPSGVSNRFSGSKSGNTASLTISGLQVEDEADYYCSSYTNNNTRVFGTGTKVTVL

SEQ ID NO: 3212 - protein, 10 aa, Artificial Sequence
  Synthetic
SSYTNNNTRV

SEQ ID NO: 3213 - protein, 131 aa, Artificial Sequence
  Synthetic
EVQLVESGGGLIRPGGSLRLSCAASGFSVSNNYMSWVRQAPGKGLEWVSVIYSGGTTYYADSVKGRFNISRDNSKNTVYLQMNSLRAEDTAVYYCAREGDVEGYYDFWSGYSRDRYYFDYWGQGALVTVSS

SEQ ID NO: 3214 - protein, 25 aa, Artificial Sequence
  Synthetic
AREGDVEGYYDFWSGYSRDRYYFDY

SEQ ID NO: 3215 - protein, 110 aa, Artificial Sequence
  Synthetic
QSALTQPASVSGSPGQSITISCTGTSSDVGGYNYVSWYQQHPGKAPKLMIYDVSNRPSGVSNRFSGSKSGNTASLTISGLQAEDEADYYCNSYTSNNTRVFGTGTKVTVL

SEQ ID NO: 3216 - protein, 10 aa, Artificial Sequence
  Synthetic
NSYTSNNTRV

SEQ ID NO: 3217 - protein, 131 aa, Artificial Sequence
  Synthetic
EVQLVESGGGLFQPGGSLRLSCAASGFSVRNNYVSWVRQAPGKGLEWVSVIYSGGTTYYADSVKGRFTISRDISENTLYLQMNSLRAEDTAVYYCAREGDVEGLHDFWSGYSRDRYYFDYWGQGTLVTVSS

SEQ ID NO: 3218 - protein, 25 aa, Artificial Sequence
  Synthetic
AREGDVEGLHDFWSGYSRDRYYFDY

SEQ ID NO: 3219 - protein, 110 aa, Artificial Sequence
  Synthetic
QSVLTQPASVSGSPGQSIIISCTGTSGDIGGYNYVSWYQQHPGKAPKLMIYDVSFRPSGVSNRFSGSKSDNTASLTISGLQAEDEADYYCSSFTGNNTRVFGTGTKVTVL

SEQ ID NO: 3220 - protein, 10 aa, Artificial Sequence
  Synthetic
SSFTGNNTRV

SEQ ID NO: 3221 - protein, 131 aa, Artificial Sequence
  Synthetic
EVQLVESGGGLIQPGGSLRLSCAASGFTVSNNYMSWVRQAPGKGLEWVSVIYSGGSTYDADSVKGRFTISRDNSKNTLYLQMNSLSAEDTAVYYCAREGDVEGYYDFWSGYSRDRYYFDYWGQGTLVTVSS

SEQ ID NO: 3222 - protein, 25 aa, Artificial Sequence
  Synthetic
AREGDVEGYYDFWSGYSRDRYYFDY

SEQ ID NO: 3223 - protein, 110 aa, Artificial Sequence
  Synthetic
QSALTQPASVSGSPGQSITISCTGTSSDVGGYNYVSWYQQHPGKAPKLMIYDVSNRPSGVSNRFSGSKSGNTASLTISGLQAEDEADYYCSSYTSSSARVFGTGTKVTVL

SEQ ID NO: 3224 - protein, 10 aa, Artificial Sequence
  Synthetic
SSYTSSSARV

SEQ ID NO: 3225 - protein, 131 aa, Artificial Sequence
  Synthetic
EVQLVESGGGLIQAGGSLRLSCAASGFGVRNNYMSWVRQAPGKGLEWVSVIYSGGTTYYADSVKGRFTISRDNSKNTVFLQMNSLRAEDTAVYYCAREGDVEGFSDLWSGYSRDRYYFDYWGQGTLVTVSS

SEQ ID NO: 3226 - protein, 25 aa, Artificial Sequence
  Synthetic
AREGDVEGFSDLWSGYSRDRYYFDY

SEQ ID NO: 3227 - protein, 110 aa, Artificial Sequence
  Synthetic
QSVLTQPASVSGSPGQSITFSCTGTSSDVGGYNYVSWYQQYPGKAPKLLIYDVTNRPSGVSDRFSGSKSGNTASLTISGLQAEDEADYYCSSFTSSNTRVFGTGTKVTVL

SEQ ID NO: 3228 - protein, 10 aa, Artificial Sequence
  Synthetic
SSFTSSNTRV

SEQ ID NO: 3229 - protein, 119 aa, Artificial Sequence
  Synthetic
EVQLVESGGNLVQPGGSLRLSCSASGFTFSNYAIHWVRQAPGKGLEYVSLVSSNGDTTYYAGSVKGRFTISRDNSKNTLYLQMSSLRAEDTAVYYCVRGDMVAGYFDYWGQGTLVTVSS

SEQ ID NO: 3230 - protein, 12 aa, Artificial Sequence
  Synthetic
VRGDMVAGYFDY

SEQ ID NO: 3231 - protein, 109 aa, Artificial Sequence
  Synthetic
SYVLTQPPSVSVAPGQTARITCGGDEIGSKNVHWYQQKPGQAPVLVVYDDSDRPSGIPERFSGSNSANTASLTISRLESGDEADYYCQVWDSSSDHHWVFGGGTKLTVL

SEQ ID NO: 3232 - protein, 12 aa, Artificial Sequence
  Synthetic
QVWDSSSDHHWV

SEQ ID NO: 3233 - protein, 129 aa, Artificial Sequence
  Synthetic
EVQLVESGGGLVQPGGSLRLSCAASGFSVSTKYMTWVRQAPGKGLEWVSVLYSGRTDYYADSVKGRFTISRDSSKNILYLQMSSLRVEDTGFYYCARDSSEVRDHPGHPGRSVGAFDIWSQGTMVTVSS

SEQ ID NO: 3234 - protein, 23 aa, Artificial Sequence
  Synthetic
ARDSSEVRDHPGHPGRSVGAFDI

SEQ ID NO: 3235 - protein, 110 aa, Artificial Sequence
  Synthetic
QSALTQPASVSGSPGQSIAISCTGTSNDVGSYTLVSWYQQYPGKAPKLLIFEDSQRSSGISNRFSGSKSGNTASLTISGLRGEDEADYYCCSYAGSHTFVFGGGTKVTVL

SEQ ID NO: 3236 - protein, 10 aa, Artificial Sequence
  Synthetic
CSYAGSHTFV

SEQ ID NO: 3237 - protein, 120 aa, Artificial Sequence
  Synthetic
EVQLVESGGGLVQPGGSLRLSCAASGFTFSNNWMSWVRQAPGKGLEWVANIKQDGSEKYYVDSVKGRFTVSRDNAKNSLYLQMSSLRAEDTAVYYCARDARNFDWYFDLWGRGTLVTVSS

SEQ ID NO: 3238 - protein, 13 aa, Artificial Sequence
  Synthetic
ARDARNFDWYFDL

SEQ ID NO: 3239 - protein, 110 aa, Artificial Sequence
  Synthetic
SYVLTQPPSVSVAPGKTARITCGGDDIATKSVHWYQQKPGQAPVLVIYYDSDRPSGIPERFSGSNSGNTATLTINRVEAGDEADYYCQVWDSTSDHRGYVFGTGTKVTVL

SEQ ID NO: 3240 - protein, 13 aa, Artificial Sequence
  Synthetic
QVWDSTSDHRGYV

SEQ ID NO: 3241 - protein, 121 aa, Artificial Sequence
  Synthetic
QVQLQESGPGLVKPSQTLSLTCTVSGGSISSGGYYWSWIRQHPGKGLEWIGYIYYSGGTYYNPSLKSRVTISVDTSKNQFSLRLSSVTAADTAVYYCAREEQQLAPWFDPWGQGTLVTVSS

SEQ ID NO: 3242 - protein, 13 aa, Artificial Sequence
  Synthetic
AREEQQLAPWFDP

SEQ ID NO: 3243 - protein, 111 aa, Artificial Sequence
  Synthetic
QSVLTQPPSVSGAPGQRVTISCTGSSSNIGAGYDVHWYQQLPGTAPKLLIYDNINRPSGVPDRFSGSKSGTSASLAITGLQAEDEADYYCQSFDSSLSAYVFAPGTKVTVL

SEQ ID NO: 3244 - protein, 11 aa, Artificial Sequence
  Synthetic
QSFDSSLSAYV

SEQ ID NO: 3245 - protein, 119 aa, Artificial Sequence
  Synthetic
  misc_feature (76)..(76): Xaa can be any naturally occurring amino acid
QVQLQESGPGLVKPSQTLSLTCTVSGGSVRSGGYYWNWIRQHPGKGLQWIGYVNYSGSTDYNPSLESRLTISVDTXKRQFSLKLTSVTAADTAVYYCASSLVPYYFDSWGQGTLVTVSS

SEQ ID NO: 3246 - protein, 11 aa, Artificial Sequence
  Synthetic
ASSLVPYYFDS

SEQ ID NO: 3247 - protein, 111 aa, Artificial Sequence
  Synthetic
QSVLTQPPSVSGAPGQRITISCTGSSSNIGAGFDVHWYQQVPGTAPKLLIYGNNIRPSGVPDRFSGSKSDTSASLAITGLQSEDEADYFCQSYDNSLSDPYVFGTGTKVTV

SEQ ID NO: 3248 - protein, 12 aa, Artificial Sequence
  Synthetic
QSYDNSLSDPYV

SEQ ID NO: 3249 - protein, 118 aa, Artificial Sequence
  Synthetic
QVQLQQWGAGLLKPSETLSLTCTVYGGSFSGYYWSWIRQPPGKGLEWIGEINHSGTTNYNPSLKSRVTISLDTSKNQFSLKLSSVTAADTAVYYCARVRWLRGETDYWGQGTLVTVSS

SEQ ID NO: 3250 - protein, 12 aa, Artificial Sequence
  Synthetic
ARVRWLRGETDY

SEQ ID NO: 3251 - protein, 111 aa, Artificial Sequence
  Synthetic
NFMLTQPHSVSESPGKTVTISCTGSSGSIASNYVQWYQQRPGSAPTTVIYEDNQRPSGVPDRFSGSIDSSSNSASLTISGLKTEDEADYYCQSYDSSNQRVFGGGTKLTVL

SEQ ID NO: 3252 - protein, 10 aa, Artificial Sequence
  Synthetic
QSYDSSNQRV

SEQ ID NO: 3253 - protein, 122 aa, Artificial Sequence
  Synthetic
QLQLQESGPGLVKPSETLSLTCTVSSGSISSSSYYWGWIRQPPGKGLEWIGSIFSSGGAHYNPSLKSRVTISVDTSRNQFSLNLTSVTAADTAVYYCARHPAVAGDEYFQHWGQGTLVTVSS

SEQ ID NO: 3254 - protein, 14 aa, Artificial Sequence
  Synthetic
ARHPAVAGDEYFQH

SEQ ID NO: 3255 - protein, 110 aa, Artificial Sequence
  Synthetic
SYVLTQPPSVSVAPGKTASITCGGDNIGSKNVHWYQQKPGQAPVLVIYYDSDRPSGIPERFSGSNSGNTATLTISRVEAGDEADYYCQVWDSTTDLPHYVFGAGTRVTVL

SEQ ID NO: 3256 - protein, 13 aa, Artificial Sequence
  Synthetic
QVWDSTTDLPHYV

SEQ ID NO: 3257 - protein, 122 aa, Artificial Sequence
  Synthetic
QLQLQESGPGLVKPSETLSLTCSVSGGSIIRSSYYWGWIRQPPGKGLEWIGSIYYSGSTYYNPSLKSRVTISVDTSKNQFSLKLSSVTAADTAVYYCARRRYLDWSSPFEYWGQGTLVTVSS

SEQ ID NO: 3258 - protein, 14 aa, Artificial Sequence
  Synthetic
ARRRYLDWSSPFEY

SEQ ID NO: 3259 - protein, 108 aa, Artificial Sequence
  Synthetic
SYVLTQPPSVSVAPGQTARITCGGNNIGSKRVHWYQQKPGQAPVLVVYDDSDRPSGIPERFSGSNSGNTATLTISRVEAGDEADYSCQVWDSSSDLQVFGGGTKLTVL

SEQ ID NO: 3260 - protein, 11 aa, Artificial Sequence
  Synthetic
QVWDSSSDLQV

SEQ ID NO: 3261 - protein, 125 aa, Artificial Sequence
  Synthetic
QLQLQESGPGLVKPSETLSLTCTVSGGSMSSSNHYWGWIRQPPGKGLEWIGSIYYSGSTFHNPSLMSRVTISVDTSKSQFSLKLTSVTAADTAVYYCARHDLPPYSSGWSYFDNWGQGTLVTVSS

SEQ ID NO: 3262 - protein, 17 aa, Artificial Sequence
  Synthetic
ARHDLPPYSSGWSYFDN

SEQ ID NO: 3263 - protein, 109 aa, Artificial Sequence
  Synthetic
QSVLTQPPSVSAAPGQKVTISCSGSTSNIGSNSVSWYQQLPGTAPKLLIYDNNKRPSGIPDRFSGSKSGTSATLGITGLQTGDEADYYCGSWDSSLREVFGTGTKVSVL

SEQ ID NO: 3264 - protein, 10 aa, Artificial Sequence
  Synthetic
GSWDSSLREV

SEQ ID NO: 3265 - protein, 121 aa, Artificial Sequence
  Synthetic
QVQLQESGPGLVKPSETLSLTCTVSGGSISTFYWNWIRQPPGKGLEWIGHIYYSGSTNYNPSLKSRVTISLDTSENQFSLRMSSVTGADTAVYYCARGVVQLNYDYGMDVWGQGTTVTVSS

SEQ ID NO: 3266 - protein, 15 aa, Artificial Sequence
  Synthetic
ARGVVQLNYDYGMDV

SEQ ID NO: 3267 - protein, 109 aa, Artificial Sequence
  Synthetic
SYVLTQPPSVSVAPGKTARITCGGDNIGSKSVHWYQQRPGQAPVLVIYYDSDRPSGIPERFSGSNSGNTATLTISRVEAGDEADYYCQVWDNGSDHPVLFGGGTKLTVL

SEQ ID NO: 3268 - protein, 12 aa, Artificial Sequence
  Synthetic
QVWDNGSDHPVL

SEQ ID NO: 3269 - protein, 121 aa, Artificial Sequence
  Synthetic
QVQLQESGPGLVKPSETLSLTCTVSGDSISTYFWAWIRQPPGRGLECIGSFFPSGSTYYNPSLKSRVTISVDTSKNQFSLKLNSVTAADTAVYYCARLKQQLVGFGWFDPWGQGSLVTVSS

SEQ ID NO: 3270 - protein, 15 aa, Artificial Sequence
  Synthetic
ARLKQQLVGFGWFDP

SEQ ID NO: 3271 - protein, 110 aa, Artificial Sequence
  Synthetic
QSVLTQPPSVSGAPGQRVTISCTGSISNIGADYEVHWYVQFPGTAPKVLIYANTNRPSGVPERFSASKSGTSASLAITGLQAEDEADYYCQSYDHRLHWVFGGGTKLTVL

SEQ ID NO: 3272 - protein, 10 aa, Artificial Sequence
  Synthetic
QSYDHRLHWV

SEQ ID NO: 3273 - protein, 120 aa, Artificial Sequence
  Synthetic
EVQLVQSGAEVKKPGESLKISCKGPAYSFTNYWIGWVRQMPGKGLEWMGVIYPGDSETRYSPSFQGQVTISADKSISTAYLQWNSLSASDTAIYYCARQFCGGHCPFDFWGQGTLVTVSS

SEQ ID NO: 3274 - protein, 13 aa, Artificial Sequence
  Synthetic
ARQFCGGHCPFDF

SEQ ID NO: 3275 - protein, 111 aa, Artificial Sequence
  Synthetic
NFMLTQPHSVSESPGKTVTISCTGNSGSIASNYVQWYQQRPDSAPTTVIFEDDQRPSGVPDRFSGSIDSSSNSASLTISGLRTEDEADYYCQSYDSNNLWVFGGGTKLTVL

SEQ ID NO: 3276 - protein, 10 aa, Artificial Sequence
  Synthetic
QSYDSNNLWV

SEQ ID NO: 3277 - protein, 118 aa, Artificial Sequence
  Synthetic
EVQLVQSGAEVKKPGDSLKISCKASGYSFTRYWIGWVRQMPGKGLDWMGIIYPGDSDTRYSSSFQGQVTISADKSISTAYLQWSSLKASDTSLYYCVRRASSTNFEFWGQGTLVTVSS

SEQ ID NO: 3278 - protein, 11 aa, Artificial Sequence
  Synthetic
VRRASSTNFEF

SEQ ID NO: 3279 - protein, 108 aa, Artificial Sequence
  Synthetic
SYVLTQPPSVSVAPGQTATITCGGNNIGSKTVHWYQQKPGQAPVVVVYDDSDRPSGIPERFSGSKSGSTATLTITRVEAGDEADYYCQVWDSTSDHYVFGTGTKVAVI

SEQ ID NO: 3280 - protein, 11 aa, Artificial Sequence
  Synthetic
QVWDSTSDHYV

SEQ ID NO: 3281 - protein, 121 aa, Artificial Sequence
  Synthetic
EVQLVQSGAEVKKPGESLKISCKGSGYSFISNWIGWVRQMPGKGLEWMGIIYPYDSDTRYSPSFQGQITISADKSISTAYLQWSSLKASDTAMYYCATSIAVSGTYAFDVWGQGTVVTVSS

SEQ ID NO: 3282 - protein, 14 aa, Artificial Sequence
  Synthetic
ATSIAVSGTYAFDV

SEQ ID NO: 3283 - protein, 111 aa, Artificial Sequence
  Synthetic
QSVLTQPPSVSGAPGQRVTISCTGSSSNIGAYGVHWYQQFPGTAPKLLIYGDSSRPSGVPDRFSASKSGTSASLAITGLQAEDEADYYCQAYDSGLSGNFVFGTGTKVTVL

SEQ ID NO: 3284 - protein, 12 aa, Artificial Sequence
  Synthetic
QAYDSGLSGNFV

SEQ ID NO: 3285 - protein, 121 aa, Artificial Sequence
  Synthetic
EVQLVQSGAEVTKTGESLKISCKSSGYSFISNWIGWVRQMPGKGLEWVAIIYPGDSDTRYSPSFQGQVTISADTSISTAYLQWSSLKASDTAMYYCARLLGGTYAADFDYWGQGTLVTVSS

SEQ ID NO: 3286 - protein, 14 aa, Artificial Sequence
  Synthetic
ARLLGGTYAADFDY

SEQ ID NO: 3287 - protein, 110 aa, Artificial Sequence
  Synthetic
QSVLTQPPSASGSPGQSVTISCTGTSSDVGGHNYVSWYRHHPGKAPKLMIYEVSKRPSGVPDRFSGSKSGNTASLTVSGLQAEDEADYYCGSYAGSHKWVFGGGTKLTVL

SEQ ID NO: 3288 - protein, 10 aa, Artificial Sequence
  Synthetic
GSYAGSHKWV

SEQ ID NO: 3289 - protein, 127 aa, Artificial Sequence; identical to SEQ ID NO: 135
  Synthetic

SEQ ID NO: 3290 - protein, 20 aa, Artificial Sequence
  Synthetic
ARDSEYSSSWYSRGYYGMDV

SEQ ID NO: 3291 - protein, 112 aa, Artificial Sequence; identical to SEQ ID NO: 136
  Synthetic

SEQ ID NO: 3292 - protein, 9 aa, Artificial Sequence
  Synthetic
MQALQTPPT

SEQ ID NO: 3293 - protein, 126 aa, Artificial Sequence
  Synthetic
EVQLVESGGGLVKPGRSLRLSCTASGFTFGDYAMSWFRQAPGKGLEWVGFIRSKAYGGTTEYAASVKGRFTISRDDSKSIAYLQMNSLKTEDTAVYYCTRARSVTMVWYRYYMDVWGKGTTVTVSS

SEQ ID NO: 3294 - protein, 17 aa, Artificial Sequence
  Synthetic
TRARSVTMVWYRYYMDV

SEQ ID NO: 3295 - protein, 112 aa, Artificial Sequence
  Synthetic
DIVMTQTPLSLSVTPGQPASISCKSSQSLLHSDGKTYLYWYLQKPGQPPQLLIYEVSNRFSGVPDRFSGSGSGTDFTLKISRVEAEDVGVYYCMQSIQLPYTFGQGTKLEIK

SEQ ID NO: 3296 - protein, 9 aa, Artificial Sequence
  Synthetic
MQSIQLPYT

SEQ ID NO: 3297 - protein, 122 aa, Artificial Sequence
  Synthetic
QVQLQQWGAGLLKPSETLSLTCAVYGGSFSGYYWSWIRQPPGKGLEWIGEVNHSGSTNYNPSLKSRVTISVDTSKNQFFLKLSSVTAADTAVYYCARHWMPRDYYYYGMDVWGQGTTVTVSS

SEQ ID NO: 3298 - protein, 16 aa, Artificial Sequence
  Synthetic
ARHWMPRDYYYYGMDV

SEQ ID NO: 3299 - protein, 107 aa, Artificial Sequence; identical to SEQ ID NO: 1283
  Synthetic

SEQ ID NO: 3300 - protein, 9 aa, Artificial Sequence
  Synthetic
QQSYSTPRT

SEQ ID NO: 3301 - protein, 118 aa, Artificial Sequence
  Synthetic
EVQLVESGGGLVQPGGSLRLSCAASGFTVSSNYMSWVRQAPGKGLEWVSVIYSGGSTYYADSVKGRFTISRDNSKNTLYLQMNSLRAEDTAVYYCARDGEGQRETDYWGQGTLVTVSS

SEQ ID NO: 3302 - protein, 12 aa, Artificial Sequence
  Synthetic
ARDGEGQRETDY

SEQ ID NO: 3303 - protein, 107 aa, Artificial Sequence
  Synthetic
DIQMTQSPSSLSASVGDRVTITCQASQDISNYLNWYQQKPGKAPKLLIYDASNLETGVPSRFSGSGSGTDFTFTISSLQPEDIATYYCQQYDNLPRTFGQGTKVEIK

SEQ ID NO: 3304 - protein, 9 aa, Artificial Sequence
  Synthetic
QQYDNLPRT

SEQ ID NO: 3305 - protein, 120 aa, Artificial Sequence
  Synthetic
QVQLQQWGAGLLKPSETLSRTCAVFGGSFTNYYWSWIRQSPGKGLEWIGEINDSGITNYNPSLKSRVTISVDTSKNQFSLSLRSVTAADTAVYYCARRRSFSRPSSIDYWGQGTLVTVSS

SEQ ID NO: 3306 - protein, 14 aa, Artificial Sequence
  Synthetic
ARRRSFSRPSSIDY

SEQ ID NO: 3307 - protein, 111 aa, Artificial Sequence
  Synthetic
DIVMTQSPLSLPVTPGEPASISCRSSQSLLHRNGYNYLDWYLQKPGQSPQLLIYLGSNRASGVPDRFRGSGSGTDFTLKISRVEAEDVGVYYCMQALQTLTFGQGTRLEIK

SEQ ID NO: 3308 - protein, 8 aa, Artificial Sequence
  Synthetic
MQALQTLT

SEQ ID NO: 3309 - protein, 123 aa, Artificial Sequence
  Synthetic
QMQLVQSGPEVKKPGTSVKVSCKASGFTFTSSAMQWVRQARGQRLEWIGWIVVGSGNTNYAQKFQERVTITRDMSTSTAYMELSSLRSEDTAVYYCAANHCSGGSCYDGFDIWGQGTMVTVSS

SEQ ID NO: 3310 - protein, 16 aa, Artificial Sequence
  Synthetic
AANHCSGGSCYDGFDI

SEQ ID NO: 3311 - protein, 108 aa, Artificial Sequence
  Synthetic
EIVLTQSPGTLSLSPGERATLSCRASQSVSSSYLAWYQQRPGQAPRLLIYGASSRATGIPDRFSGSGSGTDFTLTISRLEPEDFAVYYCQQYGSSPWMFGQGTKVEIK

SEQ ID NO: 3312 - protein, 9 aa, Artificial Sequence
  Synthetic
QQYGSSPWM

SEQ ID NO: 3313 - protein, 127 aa, Artificial Sequence; identical to SEQ ID NO: 135
  Synthetic

SEQ ID NO: 3314 - protein, 20 aa, Artificial Sequence
  Synthetic
ARDSEYSSSWYSRGYYGMDV

SEQ ID NO: 3315 - protein, 112 aa, Artificial Sequence; identical to SEQ ID NO: 136
  Synthetic

SEQ ID NO: 3316 - protein, 9 aa, Artificial Sequence
  Synthetic
MQALQTPPT

SEQ ID NO: 3317 - protein, 127 aa, Artificial Sequence
  Synthetic
QVQLQESGPGLVKPSETLSLTCTVSGASINSYYWTWIRQPPGKGLEWIGYIHDSGNTNYNPALRSRVTISLDTSKNQFSLKVRSVTAADTAVYYCAREVVVQSAKDWSHYYYYMDVWGKGTTVSVSS

SEQ ID NO: 3318 - protein, 21 aa, Artificial Sequence
  Synthetic
AREVVVQSAKDWSHYYYYMDV

SEQ ID NO: 3319 - protein, 107 aa, Artificial Sequence
  Synthetic
EIVLTQSPATLSLSPGERASLSCRASQSVGTYLAWYQQKVGQPPRLLIYDASNRATGIPARFSGSGSGTDFTLTISSLDPEDFAVYYCQQRSSWFVTFGQGTRLEIK

SEQ ID NO: 3320 - protein, 9 aa, Artificial Sequence
  Synthetic
QQRSSWFVT

SEQ ID NO: 3321 - protein, 117 aa, Artificial Sequence
  Synthetic
EVQLVESGGGLVQPGGSLRLSCAASGFTVSSNYMSWVRQAPGKGLEWVSVIYSGGSTYYADSVKGRFTISRDNSKNTLYLQMNSLRAEDTAVYHCARDLAVYGMDVWGQGTTVTVSS

SEQ ID NO: 3322 - protein, 11 aa, Artificial Sequence
  Synthetic
ARDLAVYGMDV

SEQ ID NO: 3323 - protein, 108 aa, Artificial Sequence
  Synthetic
DIQLTQSPSFLSASVGDRVTITCRASQGISSYLAWYQQKPGKAPKLLIYAASTLQSGVPSRFSGSGSGTEFTLTISSLQPEDFATYYCQQLNSYPPVTFGQGTRLEIK

SEQ ID NO: 3324 - protein, 10 aa, Artificial Sequence
  Synthetic
QQLNSYPPVT

SEQ ID NO: 3325 - protein, 120 aa, Artificial Sequence; identical to SEQ ID NO: 1349
  Synthetic

SEQ ID NO: 3326 - protein, 13 aa, Artificial Sequence
  Synthetic
TRDDSSWPHFFDN

SEQ ID NO: 3327 - protein, 108 aa, Artificial Sequence
  Synthetic
DIQMTQSPSSLSASVGDRVTITCRASQSIINYLNWYQQKPGKAPKLLIYTASSLQSGVPSRFSGSGSGTDFTLTISSLQPEDFATYFCQQSYSSPLWTFGQGTKVEIK

SEQ ID NO: 3328 - protein, 10 aa, Artificial Sequence
  Synthetic
QQSYSSPLWT

SEQ ID NO: 3329 - protein, 121 aa, Artificial Sequence
  Synthetic
QVQLQQWGAGLLKPSETLSRTCGVYGGSFRDYYWSWIRQSPGKGLEWIGEINHSGSTNYNPSLLGRVTISVDTSKNQFSLRLTSVTAADTAVYYCARAYVSSVSEDYFDYWGQGTLVTVSS

SEQ ID NO: 3330 - protein, 15 aa, Artificial Sequence
  Synthetic
ARAYVSSVSEDYFDY

SEQ ID NO: 3331 - protein, 107 aa, Artificial Sequence
  Synthetic
DIQMTQSPSSLSASVGDRVTITCRASQSISTYLNWYQQKPGKAPELLIYAASSFQSGVPSRFSGSGSGTDFTLTIRSLEPEDSATYYCQQSYTTPYTFGQGTKLEIK

SEQ ID NO: 3332 - protein, 9 aa, Artificial Sequence
  Synthetic
QQSYTTPYT

SEQ ID NO: 3333 - protein, 127 aa, Artificial Sequence; identical to SEQ ID NO: 135
  Synthetic

SEQ ID NO: 3334 - protein, 20 aa, Artificial Sequence
  Synthetic
ARDSEYSSSWYSRGYYGMDV

SEQ ID NO: 3335 - protein, 112 aa, Artificial Sequence; identical to SEQ ID NO: 136
  Synthetic

SEQ ID NO: 3336 - protein, 9 aa, Artificial Sequence
  Synthetic
MQALQTPPT

SEQ ID NO: 3337 - protein, 127 aa, Artificial Sequence
  Synthetic
QVQLQESGPGLVKPSETLSLTCTVSGGSMTSYYWNWIRHTPGKDLEWIGYIDYSGNTNYNPSLRSRGTISVDTSKNQFSLRVTSVTAADTAVYYCAREVVVSSPKDWSHYYYYMDVWGKGTTVTVSS

SEQ ID NO: 3338 - protein, 21 aa, Artificial Sequence
  Synthetic
AREVVVSSPKDWSHYYYYMDV

SEQ ID NO: 3339 - protein, 107 aa, Artificial Sequence
  Synthetic
EIVLTQSPATLSLSPGERATLSCRASQSVSTYLTWYQQKPGQAPRLLIYDASNRATGIPARFSGSGSGTDFTLTITSLEPEDFALYYCQQRSTWFVTFGQGTRLEIK

SEQ ID NO: 3340 - protein, 9 aa, Artificial Sequence
  Synthetic
QQRSTWFVT

SEQ ID NO: 3341 - protein, 127 aa, Artificial Sequence; identical to SEQ ID NO: 3317
  Synthetic

SEQ ID NO: 3342 - protein, 21 aa, Artificial Sequence
  Synthetic
AREVVVQSAKDWSHYYYYMDV

SEQ ID NO: 3343 - protein, 107 aa, Artificial Sequence; identical to SEQ ID NO: 3319
  Synthetic

SEQ ID NO: 3344 - protein, 9 aa, Artificial Sequence
  Synthetic
QQRSSWFVT

SEQ ID NO: 3345 - protein, 120 aa, Artificial Sequence; identical to SEQ ID NO: 3305
  Synthetic

SEQ ID NO: 3346 - protein, 14 aa, Artificial Sequence
  Synthetic
ARRRSFSRPSSIDY

SEQ ID NO: 3347 - protein, 111 aa, Artificial Sequence; identical to SEQ ID NO: 3307
  Synthetic

SEQ ID NO: 3348 - protein, 8 aa, Artificial Sequence
  Synthetic
MQALQTLT

SEQ ID NO: 3349 - protein, 120 aa, Artificial Sequence; identical to SEQ ID NO: 1349
  Synthetic

SEQ ID NO: 3350 - protein, 13 aa, Artificial Sequence
  Synthetic
TRDDSSWPHFFDN

SEQ ID NO: 3351 - protein, 106 aa, Artificial Sequence
  Synthetic
EIVMTQSPATLSVSPGERATLSCRASQSVSSNLAWYHQKPGQAPRLLIYGASTRATGIPARFSGSGSGTEFTLTISSLQSEDFAVYYCQQYDNWPLFGQGTRLEIK

SEQ ID NO: 3352 - protein, 8 aa, Artificial Sequence
  Synthetic
QQYDNWPL

SEQ ID NO: 3353 - protein, 120 aa, Artificial Sequence
  Synthetic
EVQLVESGGGLVQPGGSLRLSCAASGFTFSSYDMHWVRQATGKGLEWVSAIGTAGDTYYPGSVKGRFTISRENAKNSLYLQMNSLRAGDTAVYYCARGTTFNHYYYMDVWGKGTTVTVSS

SEQ ID NO: 3354 - protein, 14 aa, Artificial Sequence
  Synthetic
ARGTTFNHYYYMDV

SEQ ID NO: 3355 - protein, 108 aa, Artificial Sequence
  Synthetic
  misc_feature (20)..(20): Xaa can be any naturally occurring amino acid
DIQMTQSPSSLSASVGDRVXITCRASQSISSYLNWYQQKPGKAPKLLIYAASSLQSGVPSRFSGSGSGTDFTLTISSLQPEDFATYYCQQSYSTPPWTFGQGTKVEIK

SEQ ID NO: 3356 - protein, 10 aa, Artificial Sequence
  Synthetic
QQSYSTPPWT

SEQ ID NO: 3357 - protein, 128 aa, Artificial Sequence
  Synthetic
EVQLVESGGGLVKPGGSLRLSCAASGFTFSNAWMSWVRQAPGKGLEWVGRIKSKTDGGTTDYAAPVKGRFTISRDDSKNTLYLQMNSLKTEDTAVYYCTTDVGADSSSAYYYYYMDVWGKGTTVTVSS

SEQ ID NO: 3358 - protein, 19 aa, Artificial Sequence
  Synthetic
TTDVGADSSSAYYYYYMDV

SEQ ID NO: 3359 - protein, 108 aa, Artificial Sequence
  Synthetic
  misc_feature (9)..(9): Xaa can be any naturally occurring amino acid
EIVLTQSPXSLSLSPGERATLSCGASQSVSSSYLAWYQQKPGLAPRLLIYDASSRATGIPDRFSGSGSGTDFTLTISRLEPEDFAVYYCQQYGSSPYTFGQGTKLEIK

SEQ ID NO: 3360 - protein, 9 aa, Artificial Sequence
  Synthetic
QQYGSSPYT

SEQ ID NO: 3361 - protein, 127 aa, Artificial Sequence; identical to SEQ ID NO: 3317
  Synthetic

SEQ ID NO: 3362 - protein, 21 aa, Artificial Sequence
  Synthetic
AREVVVQSAKDWSHYYYYMDV

SEQ ID NO: 3363 - protein, 107 aa, Artificial Sequence; identical to SEQ ID NO: 3319
  Synthetic

SEQ ID NO: 3364 - protein, 9 aa, Artificial Sequence
  Synthetic
QQRSSWFVT

SEQ ID NO: 3365 - protein, 120 aa, Artificial Sequence; identical to SEQ ID NO: 2345
  Synthetic

SEQ ID NO: 3366 - protein, 13 aa, Artificial Sequence
  Synthetic
ARDVASNYAYFDL

SEQ ID NO: 3367 - protein, 106 aa, Artificial Sequence
  Synthetic
EIVMTQSPATLSLSPGERATLSCRASQSVSSNLAWYHQKPGQAPRLLIYGASTRATGIPARFSGSGSGTEFTLTISSLQSEDFAVYYCQQYDNWPLFGQGTRLEIK

SEQ ID NO: 3368 - protein, 8 aa, Artificial Sequence
  Synthetic
QQYDNWPL

SEQ ID NO: 3369 - protein, 127 aa, Artificial Sequence; identical to SEQ ID NO: 135
  Synthetic

SEQ ID NO: 3370 - protein, 20 aa, Artificial Sequence
  Synthetic
ARDSEYSSSWYSRGYYGMDV

SEQ ID NO: 3371 - protein, 112 aa, Artificial Sequence; identical to SEQ ID NO: 136
  Synthetic

SEQ ID NO: 3372 - protein, 9 aa, Artificial Sequence
  Synthetic
MQALQTPPT

SEQ ID NO: 3373 - protein, 120 aa, Artificial Sequence
  Synthetic
QVQLQQWGAGLLKPSETLSRTCAVYGGSFTDYYWSWIRQSPGKGLEWIGEINHSGSTNYNPFLKSRVTLSVDTSKNQFSLKLDSLTVADTAIYYCARGAKGDSDWYFDLWGRGTLVTVSS

SEQ ID NO: 3374 - protein, 14 aa, Artificial Sequence
  Synthetic
ARGAKGDSDWYFDL

SEQ ID NO: 3375 - protein, 109 aa, Artificial Sequence
  Synthetic
EIVLTQSPATLSLSPGERATLSCRASQSVSNYLAWYQQKPGQAPRLLISDASNRATGVPDRFSGSGSGTDFTLTINSLEPEDFAVYYCQQGDNWPRMYTFGQGTKLQIK

SEQ ID NO: 3376 - protein, 11 aa, Artificial Sequence
  Synthetic
QQGDNWPRMYT

SEQ ID NO: 3377 - protein, 127 aa, Artificial Sequence; identical to SEQ ID NO: 3317
  Synthetic

SEQ ID NO: 3378 - protein, 21 aa, Artificial Sequence
  Synthetic
AREVVVQSAKDWSHYYYYMDV

SEQ ID NO: 3379 - protein, 107 aa, Artificial Sequence; identical to SEQ ID NO: 3319
  Synthetic

SEQ ID NO: 3380 - protein, 9 aa, Artificial Sequence
  Synthetic
QQRSSWFVT

SEQ ID NO: 3381 - protein, 117 aa, Artificial Sequence
  Synthetic
EVQLVQSGPVLVKPGPSVKISCKASGFTFTDYYMHWVKQSHGKSLEWIGLVYPYNGGTSYNQKFKGKATLTVDTSSSTAYMELNSLTSEDSAVYYCARSGPDYFDYWGQGTTLTVSS

SEQ ID NO: 3382 - protein, 10 aa, Artificial Sequence
  Synthetic
ARSGPDYFDY

SEQ ID NO: 3383 - protein, 107 aa, Artificial Sequence
  Synthetic
EIVMTQSPATLSVSPGERATLSCRASQSVSSNLAWYQQKPGQAPRLLIYGASTRATGIPARFSGSGSGTEFTLTISSLQSEDFAVYYCQQYNNWPRTFGGGTKVEIK

SEQ ID NO: 3384 - protein, 9 aa, Artificial Sequence
  Synthetic
QQYNNWPRT

SEQ ID NO: 3385 - protein, 123 aa, Artificial Sequence
  Synthetic
QMQLVQSGPEVKKPGTSVKVSCKASGFTFTSSAMQWVRQARGQRLEWIGWIVVGSGNTNYAQKFQERVTITRDMSTSTAYMELSSLRSEDTAVYYCAAPYCSGGSCNDAFDIWGQGTMVTVSS

SEQ ID NO: 3386 - protein, 16 aa, Artificial Sequence
  Synthetic
AAPYCSGGSCNDAFDI

SEQ ID NO: 3387 - protein, 108 aa, Artificial Sequence
  Synthetic
EIVLTQSPGTLSLSPGERATLSCRASQSVSSSYLAWYQQKPGQAPRLLIYGASSRATGIPDRFSGSGSGTDFTLTISRLEPEDFAVYYCQQYGSSPWTFGQGTKVEIK

SEQ ID NO: 3388 - protein, 9 aa, Artificial Sequence
  Synthetic
QQYGSSPWT

SEQ ID NO: 3389 - protein, 120 aa, Artificial Sequence; identical to SEQ ID NO: 3305
  Synthetic

SEQ ID NO: 3390 - protein, 14 aa, Artificial Sequence
  Synthetic
ARRRSFSRPSSIDY

SEQ ID NO: 3391 - protein, 111 aa, Artificial Sequence
  Synthetic
  misc_feature (30)..(30): Xaa can be any naturally occurring amino acid
DIVMTQSPLSLPVTPGEPASISCRSSQSLXHRNGYNYLDWYLQKPGQSPQLLIYLGSNRASGVPDRFRGSGSGTDFTLKISRVEAEDVGVYYCMQALQTLTFGQGTRLEIK

SEQ ID NO: 3392 - protein, 8 aa, Artificial Sequence
  Synthetic
MQALQTLT

SEQ ID NO: 3393 - protein, 127 aa, Artificial Sequence; identical to SEQ ID NO: 135
  Synthetic

SEQ ID NO: 3394 - protein, 20 aa, Artificial Sequence
  Synthetic
ARDSEYSSSWYSRGYYGMDV

SEQ ID NO: 3395 - protein, 110 aa, Artificial Sequence
  Synthetic
QSVLTQPPSASGSPGQSVTISCTGTSSDVGGYNYVSWYQHHPGKAPKLMIFEVTKRPSGVPDRFSGSKSGNTASLTVSGLQAEDEADYYCYSYGGNNNAVFGGGTKLTVL

SEQ ID NO: 3396 - protein, 10 aa, Artificial Sequence
  Synthetic
YSYGGNNNAV

SEQ ID NO: 3397 - protein, 130 aa, Artificial Sequence
  Synthetic
QVQLVQSGAEVKKPGASVKVSCKASGYTFTGYYMHWVRQAPGQGLEWMGRINPNSGGTNYAQKFQGRVTMTRDTSISTAYMELSRLRSDDTAVYYCAREYLERYFDGGQRWISYYYMDVWGKGTAVTVSS

SEQ ID NO: 3398 - protein, 23 aa, Artificial Sequence
  Synthetic
AREYLERYFDGGQRWISYYYMDV

SEQ ID NO: 3399 - protein, 111 aa, Artificial Sequence
  Synthetic
QSVLTQPASVSGSPGQSITISCTGTSSDVGGYNYVSWYQQHPGKAPKLMIYDVSNRPSGVSNRFSGSKSGNTASLTISGLQAEDEADYYCSSYTPNSTLVVFGGGTKLTVL

SEQ ID NO: 3400 - protein, 11 aa, Artificial Sequence
  Synthetic
SSYTPNSTLVV

SEQ ID NO: 3401 - protein, 125 aa, Artificial Sequence
  Synthetic
QVQLVQSGAEVKKPGASVKVSCKASGYTFSNYYIHWVRQAPGKGLEWMGMINPNGGTTRYPLKFQGRVTMTRDTSTRTVYMELNSLRSEDTALYFCAREIPDILEVVAATGSLDDWGQGSLVTVS

SEQ ID NO: 3402 - protein, 19 aa, Artificial Sequence
  Synthetic
AREIPDILEVVAATGSLDD

SEQ ID NO: 3403 - protein, 109 aa, Artificial Sequence
  Synthetic
QSVLTQPPSASGSPGQSVTISCTGTRSDVGGYNYVSWYQQHPGKAPKLIIYEVTKRPSGVPDRFSGSKSGDTASLTVSGLQADDEADYFCSSYAGITNLVFGGGTKLTV

SEQ ID NO: 3404 - protein, 10 aa, Artificial Sequence
  Synthetic
SSYAGITNLV

SEQ ID NO: 3405 - protein, 119 aa, Artificial Sequence
  Synthetic
EVQLVQSGAEVKKPGESLKISCKGSGYSFTSYWIGWVRQMPGKGLEWMGIIYPGDSDTRYSPSFQGQVTISADKSISTAYLQWSSLKASDTAMYYCARGVAVDWYFDLWGRGTLVTVSS

SEQ ID NO: 3406 - protein, 12 aa, Artificial Sequence
  Synthetic
ARGVAVDWYFDL

SEQ ID NO: 3407 - protein, 112 aa, Artificial Sequence
  Synthetic
QSVLTQPPSVSGAPGQRVTISCTGSSSNIGAGYDVHWYQQLPGTAPKLLIYGNSNRPSGVPDRFSGSKSGTSASLAITGLQAEDEADYYCQSYDSSLSALYVFGTGTKVTVL

SEQ ID NO: 3408 - protein, 12 aa, Artificial Sequence
  Synthetic
QSYDSSLSALYV

SEQ ID NO: 3409 - protein, 121 aa, Artificial Sequence
  Synthetic
EVQLVESGGGLVQPGGSLRLSCAASGFIFSSYWMTWVRQAPGKGLEWVASIKYNGNERNYVDSVKGRFTISRDNARNSLFLQLNNLGAEDTAVYYCARQPESTIWYYFDYWGQGTLVTVSS

SEQ ID NO: 3410 - protein, 14 aa, Artificial Sequence
  Synthetic
ARQPESTIWYYFDY

SEQ ID NO: 3411 - protein, 108 aa, Artificial Sequence
  Synthetic
SYELTQPPSVSVSPGQTARVTCSGHALPDQYTYWYQQRPGRAPVLVIYVNNQRPSGIPDRFSATTSGTTVTLTISGVQAEDEADYYCQSADSSGSYVVFGGGTKLTVL

SEQ ID NO: 3412 - protein, 11 aa, Artificial Sequence
  Synthetic
QSADSSGSYVV

SEQ ID NO: 3413 - protein, 121 aa, Artificial Sequence
  Synthetic
EVQLVESGGGLVQPGGSLRLSCAASGFTFSSYAMHWVRQAPGKGLEYVSGISSNGGSPYYANSVKGRFTISRDNSKNTLYLQMGSLRAEDMAVYYCARGPIAAAGSYFDYWGQGTLVTVSS

SEQ ID NO: 3414 - protein, 14 aa, Artificial Sequence
  Synthetic
ARGPIAAAGSYFDY

SEQ ID NO: 3415 - protein, 109 aa, Artificial Sequence
  Synthetic
SYVLTQPPSVSVAPGQTARITCGGNNIGSKNVHWYQQKPGQAPVLVVYDDSDRPSGIPERFSGSNSGNTATLTISRVEAGDEADYYCQVWDSSSDPHWVFGGGTKLTVL

SEQ ID NO: 3416 - protein, 12 aa, Artificial Sequence
  Synthetic
QVWDSSSDPHWV

SEQ ID NO: 3417 - protein, 124 aa, Artificial Sequence
  Synthetic
QVQLVESGGGVVQPGRSLRLSCAASGFTFNRIAMYWVRQAPGKGLEWVAVISFDGSYEYYAESVKGRFAISRDNSKNTLYLQMNSLRAEDTAVYYCAKSPMGYCTNGVCYPDSWGQGTLVTVSS

SEQ ID NO: 3418 - protein, 17 aa, Artificial Sequence
  Synthetic
AKSPMGYCTNGVCYPDS

SEQ ID NO: 3419 - protein, 111 aa, Artificial Sequence
  Synthetic
NFMLTQPHSVSESPGKTVTISCTGSSGSIASNYVQWYQQRPGSAPTTVIYEDTQRPSGVPDRFSGSIDSSSNSASLTISGLKTEDEADYYCQSYDINSRWVFGGGTKLTVL

SEQ ID NO: 3420 - protein, 10 aa, Artificial Sequence
  Synthetic
QSYDINSRWV

SEQ ID NO: 3421 - protein, 127 aa, Artificial Sequence
  Synthetic
QVQLQQWGAGLLKPSETLSLTCAVYGGSFSGYYWSWIRQPPGKGLEWIGEINHSGSTNYNPSLKSRVTISVDTSKNQFSLKLSSVTAADTAVYYCARAGFGVVITYGSGTDPLFDYWGQGTLVTVSS

SEQ ID NO: 3422 - protein, 21 aa, Artificial Sequence
  Synthetic
ARAGFGVVITYGSGTDPLFDY

SEQ ID NO: 3423 - protein, 112 aa, Artificial Sequence
  Synthetic
QSVLTQPPSVSGAPGQRVTISCTGSNSNIGAGYDVHWYQQLPGTAPKLLIYGNSNRPSGVPDRFSGSKSGTSASLAITGLQAEDEADYYCQSYDSSLSGSRVFGGGTKLTVL

SEQ ID NO: 3424 - protein, 12 aa, Artificial Sequence
  Synthetic
QSYDSSLSGSRV

SEQ ID NO: 3425 - protein, 121 aa, Artificial Sequence; identical to SEQ ID NO: 3409
  Synthetic

SEQ ID NO: 3426 - protein, 14 aa, Artificial Sequence
  Synthetic
ARQPESTIWYYFDY

SEQ ID NO: 3427 - protein, 108 aa, Artificial Sequence
  Synthetic
SYVLTQPPSVSVSPGQTARVTCSGHALPDQYTYWYQQRPGRAPVLVIYVNNQRPSGIPDRFSATTSGTTVTLTISGVQAEDEADYYCQSADSSGSYVVFGGGTKLTVL

SEQ ID NO: 3428 - protein, 11 aa, Artificial Sequence
  Synthetic
QSADSSGSYVV

SEQ ID NO: 3429 - protein, 119 aa, Artificial Sequence; identical to SEQ ID NO: 3405
  Synthetic

SEQ ID NO: 3430 - protein, 12 aa, Artificial Sequence
  Synthetic
ARGVAVDWYFDL

SEQ ID NO: 3431 - protein, 112 aa, Artificial Sequence; identical to SEQ ID NO: 3407
  Synthetic

SEQ ID NO: 3432 - protein, 12 aa, Artificial Sequence
  Synthetic
QSYDSSLSALYV

SEQ ID NO: 3433 - protein, 119 aa, Artificial Sequence; identical to SEQ ID NO: 3405
  Synthetic

SEQ ID NO: 3434 - protein, 12 aa, Artificial Sequence
  Synthetic
ARGVAVDWYFDL

SEQ ID NO: 3435 - protein, 112 aa, Artificial Sequence; identical to SEQ ID NO: 3407
  Synthetic

SEQ ID NO: 3436 - protein, 12 aa, Artificial Sequence
  Synthetic
QSYDSSLSALYV

SEQ ID NO: 3437 - protein, 121 aa, Artificial Sequence; identical to SEQ ID NO: 3409
  Synthetic

SEQ ID NO: 3438 - protein, 14 aa, Artificial Sequence
  Synthetic
ARQPESTIWYYFDY

SEQ ID NO: 3439 - protein, 108 aa, Artificial Sequence; identical to SEQ ID NO: 3411
  Synthetic

SEQ ID NO: 3440 - protein, 11 aa, Artificial Sequence
  Synthetic
QSADSSGSYVV

SEQ ID NO: 3441 - protein, 127 aa, Artificial Sequence; identical to SEQ ID NO: 3421
  Synthetic

SEQ ID NO: 3442 - protein, 21 aa, Artificial Sequence
  Synthetic
ARAGFGVVITYGSGTDPLFDY

SEQ ID NO: 3443 - protein, 112 aa, Artificial Sequence
  Synthetic
QSVLTQPPSVSGAPGQRVTISCTGSSSNIGAGYDVHWYQQLPGTAPKLLIYGNSNRPSGVPDRFSGSKSGTSASLAITGLQAEDEADYYCQSYDSSLSGSRVFGGGTKLTVL

SEQ ID NO: 3444 - protein, 12 aa, Artificial Sequence
  Synthetic
QSYDSSLSGSRV

SEQ ID NO: 3445 - protein, 130 aa, Artificial Sequence
  Synthetic
EVQLVESGGGLVKPGGSLRLSCAASGFTFSNAWMSWVRQAPGKGLEWVGRIKSKTDGGTTDYAAPVKGRFTISRDDSKNTLYLQMNSLKTEDTAVYYCTTDPHCSSTSCPIFYYYYMDVWGKGTTVTVSS

SEQ ID NO: 3446 - protein, 21 aa, Artificial Sequence
  Synthetic
TTDPHCSSTSCPIFYYYYMDV

SEQ ID NO: 3447 - protein, 108 aa, Artificial Sequence
  Synthetic
SYVLTQPPSVSVAPGQTARITCGGNNIGSKSVHWYQQKPGQAPVLVVYDDSDRPSGIPERFSGSNSGNTATLTISRVEAGDEADYYCQVWDSSSDQGVFGGGTKLTVL

SEQ ID NO: 3448 - protein, 11 aa, Artificial Sequence
  Synthetic
QVWDSSSDQGV

SEQ ID NO: 3449 - protein, 119 aa, Artificial Sequence; identical to SEQ ID NO: 3405
  Synthetic

SEQ ID NO: 3450 - protein, 12 aa, Artificial Sequence
  Synthetic
ARGVAVDWYFDL

SEQ ID NO: 3451 - protein, 112 aa, Artificial Sequence; identical to SEQ ID NO: 3407
  Synthetic

SEQ ID NO: 3452 - protein, 12 aa, Artificial Sequence
  Synthetic
QSYDSSLSALYV

SEQ ID NO: 3453 - protein, 119 aa, Artificial Sequence
  Synthetic
EVQLVQSGAEVKKPGESLKISCKGSGYSFTSYWIGWVRQMPGKGLEWVGIIYPGDSDTRYSPSFQGQVTISADKSISTAYLQWSSLKASDTAMYYCARGIAVDWYFDLWGRGTLVTVSS

SEQ ID NO: 3454 - protein, 12 aa, Artificial Sequence
  Synthetic
ARGIAVDWYFDL

SEQ ID NO: 3455 - protein, 111 aa, Artificial Sequence
  Synthetic
QSVLTQPASVSGSPGQSITISCTGTSSDIGVYNYISWSQQHPGKAPKVMIYDVTNRPSGVSNRFSGSKSGNTASLTISGLQAEDEADYYCSSYRGSSTPYVFGTGTKVTVL

SEQ ID NO: 3456 - protein, 11 aa, Artificial Sequence
  Synthetic
SSYRGSSTPYV

SEQ ID NO: 3457 - protein, 124 aa, Artificial Sequence
  Synthetic
QVQLVQSGAEVKKPGSSVKVSCKASGGTFSSYTISWVRQAPGQGLEWMGRIIPILGIANYAQKFQGRVTITADKSTSTAYMELSSLRSEDTAVYYCARDSGYSGYGSTYYMDVWGKGTTVTVSS

SEQ ID NO: 3458 - protein, 17 aa, Artificial Sequence
  Synthetic
ARDSGYSGYGSTYYMDV

SEQ ID NO: 3459 - protein, 111 aa, Artificial Sequence
  Synthetic
QSVLTQPPSVSGAPGQRVTISCTGSSSNIGAGYDVHWYQQLPGTAPKLLIYGNSNRPSGVPDRFSGSKSGTSASLAITGLQAEDEADYYCQSYDSSLSGSVFGTVTKVTVL

SEQ ID NO: 3460 - protein, 11 aa, Artificial Sequence
  Synthetic
QSYDSSLSGSV

SEQ ID NO: 3461 - protein, 119 aa, Artificial Sequence; identical to SEQ ID NO: 3405
  Synthetic

SEQ ID NO: 3462 - protein, 12 aa, Artificial Sequence
  Synthetic
ARGVAVDWYFDL

SEQ ID NO: 3463 - protein, 112 aa, Artificial Sequence; identical to SEQ ID NO: 3407
  Synthetic

SEQ ID NO: 3464 - protein, 12 aa, Artificial Sequence
  Synthetic
QSYDSSLSALYV

SEQ ID NO: 3465 - protein, 119 aa, Artificial Sequence
  Synthetic
EVQLVQSGAEVKKPGESLKISCKGSGYSFTSYWTGWVRQMPGKGLEWMGIIYPGDSDTRYRPAFQGQVTISADKSISTAYLQWSSLKASDTAMYYCARGVAVDWYFDLWGRGTLVTVSS

SEQ ID NO: 3466 - protein, 12 aa, Artificial Sequence
  Synthetic
ARGVAVDWYFDL

SEQ ID NO: 3467 - protein, 112 aa, Artificial Sequence; identical to SEQ ID NO: 3407
  Synthetic

SEQ ID NO: 3468 - protein, 12 aa, Artificial Sequence
  Synthetic
QSYDSSLSALYV

SEQ ID NO: 3469 - protein, 119 aa, Artificial Sequence
  Synthetic
EVQLVQSGAEVKKPGESLKISCKGSGYSFTSYWIGWVRQMPGKGLEWMGIIYPGDSDTRYSPSFQGQVTISADKSISSAYLQWSSLKASDTAMYYCARGVAVDWYFDLWGRGTLVTVSS

SEQ ID NO: 3470 - protein, 12 aa, Artificial Sequence
  Synthetic
ARGVAVDWYFDL

SEQ ID NO: 3471 - protein, 112 aa, Artificial Sequence
  Synthetic
QSVLTQPPSVSGAPGQRVTISCTGSSSNIGAGYDVHWYQQLPGTAPKLLIYGNSNRPSGVPDRFSGSKSGTSASLAITGLQAEDEADYYCQSYDSSLSVLYVFGTGTKVTVL

SEQ ID NO: 3472 - protein, 12 aa, Artificial Sequence
  Synthetic
QSYDSSLSVLYV

SEQ ID NO: 3473 - protein, 127 aa, Artificial Sequence
  Synthetic
EVQLVESGGGLVQPGGSLRLSCAASGFTFSSYAMHWVRQAPGKGLEYVSVISSNGGSTYYANSVKGRFTISRDNSKNTLYLQMGSLRAEDMAVYYCAREGPFLPSLYSSSRDAFDIWGQGTMVTVSS

SEQ ID NO: 3474 - protein, 20 aa, Artificial Sequence
  Synthetic
AREGPFLPSLYSSSRDAFDI

SEQ ID NO: 3475 - protein, 108 aa, Artificial Sequence
  Synthetic
SYVLTQPPSVSVAPGQTARITCGGNNIGSKSVHWYQQKPGQAPVLVVYDDSDRPSGIPERFSGSNSGDTATLTISRVEAGDEADYYCQVWDSSSDPHYVFGTGTKVTV

SEQ ID NO: 3476 - protein, 12 aa, Artificial Sequence
  Synthetic
QVWDSSSDPHYV

SEQ ID NO: 3477 - protein, 130 aa, Artificial Sequence; identical to SEQ ID NO: 3445
  Synthetic

SEQ ID NO: 3478 - protein, 21 aa, Artificial Sequence
  Synthetic
TTDPHCSSTSCPIFYYYYMDV

SEQ ID NO: 3479 - protein, 108 aa, Artificial Sequence; identical to SEQ ID NO: 3447
  Synthetic

SEQ ID NO: 3480 - protein, 11 aa, Artificial Sequence
  Synthetic
QVWDSSSDQGV

SEQ ID NO: 3481 - protein, 119 aa, Artificial Sequence
  Synthetic
EVQLVQSGAEVKKPGESLKISCKGSGYSFTTYWIGWVRQMPGKGLEWMGIIYPADSDTRYSPSFQGQVTISADKSISTAYLQWSSLKASDTAMYYCARGVAVDWYFDLWGRGTLVTVSS

SEQ ID NO: 3482 - protein, 12 aa, Artificial Sequence
  Synthetic
ARGVAVDWYFDL

SEQ ID NO: 3483 - protein, 112 aa, Artificial Sequence
  Synthetic
QSVLTQPPSVSGAPGQRVTISCTGSSSNIGAGYDVHWYQQLPGTAPKLLIYGYTNRPSGVPDRFSGSKSGTSASLAITGLQAEDEADYYCQSYDSSLSALYVFGTGTKVTVL

SEQ ID NO: 3484 - protein, 12 aa, Artificial Sequence
  Synthetic
QSYDSSLSALYV

SEQ ID NO: 3485 - protein, 119 aa, Artificial Sequence; identical to SEQ ID NO: 3405
  Synthetic

SEQ ID NO: 3486 - protein, 12 aa, Artificial Sequence
  Synthetic
ARGVAVDWYFDL

SEQ ID NO: 3487 - protein, 112 aa, Artificial Sequence
  Synthetic
QSVLTQPPSVSGAPGQRVTISCTGSSSNIGAGSDVHWYQQLPGTAPKLLIYGNSNRPSGVPDRFSGSKSGTSASLAITGLQAEDEADYYCQSYDSSLSALYVFGTGTKVTVL

SEQ ID NO: 3488 - protein, 12 aa, Artificial Sequence
  Synthetic
QSYDSSLSALYV

SEQ ID NO: 3489 - protein, 121 aa, Artificial Sequence
  Synthetic
QVQLQESGPGLVKPSETLSLTCTVSGGSISSYYWSWIRQPPGKGLEWIGYIHYSGSTNYNPSLKSRVTISVDTSKNQFSLKLSSVTAADTAVYYCARHYDILTALSWFDPWGQGTLVTVSS

SEQ ID NO: 3490 - protein, 15 aa, Artificial Sequence
  Synthetic
ARHYDILTALSWFDP

SEQ ID NO: 3491 - protein, 111 aa, Artificial Sequence
  Synthetic
QSVLTQPPSVSAAPGQKVTISCSGSSSNIGNNYVSWYQQLPGTAPKLLIYDNNKRPSGIPDRFSGSKSGTSATLGITGLQTGDEADYYCGTWDSSLSAYWVFGGGTKLTVL

SEQ ID NO: 3492 - protein, 12 aa, Artificial Sequence
  Synthetic
GTWDSSLSAYWV

SEQ ID NO: 3493 - protein, 124 aa, Artificial Sequence; identical to SEQ ID NO: 3417
  Synthetic

SEQ ID NO: 3494 - protein, 17 aa, Artificial Sequence
  Synthetic
AKSPMGYCTNGVCYPDS

SEQ ID NO: 3495 - protein, 111 aa, Artificial Sequence; identical to SEQ ID NO: 3419
  Synthetic

SEQ ID NO: 3496 - protein, 10 aa, Artificial Sequence
  Synthetic
QSYDINSRWV

SEQ ID NO: 3497 - protein, 121 aa, Artificial Sequence; identical to SEQ ID NO: 167
  Synthetic

SEQ ID NO: 3498 - protein, 15 aa, Artificial Sequence
  Synthetic
ARLLSTEWLFNWFDP

SEQ ID NO: 3499 - protein, 107 aa, Artificial Sequence
  Synthetic
SYVLTQPPSVSVSPGQTASITCSGDKLGDKYACWYQQKPGQSPVLVIYQDSKRPSGIPERFSGSNSGNTATLTISGTQAMDEADYYCQAWDSSTAYVFGTGTKVTVL

SEQ ID NO: 3500 - protein, 10 aa, Artificial Sequence
  Synthetic
QAWDSSTAYV

SEQ ID NO: 3501 - protein, 121 aa, Artificial Sequence; identical to SEQ ID NO: 1337
  Synthetic

SEQ ID NO: 3502 - protein, 14 aa, Artificial Sequence
  Synthetic
AKDTGSMIVELLGY

SEQ ID NO: 3503 - protein, 109 aa, Artificial Sequence
  Synthetic
QSVLTQPPSVSGAPGQRVTISCTGSSSNIGAGSDVHWYQKLPGTAPKVFIYGYNNRPSGVPDRFSGSKSGTSASLAITGLQAEDEADYYCQSYDTSLRVVFGGGTKLTV

SEQ ID NO: 3504 - protein, 10 aa, Artificial Sequence
  Synthetic
QSYDTSLRVV

SEQ ID NO: 3505 - protein, 117 aa, Artificial Sequence
  Synthetic
EVQLVESGGGLVQPGGSLRLSCEASGITVSSNYMTWVRQAPGKGLEWVSLIYAGGSTFYADSVKGRFTISRDDSKNTLYLQMNSLRADDTAVYYCARDIVVYGMDVWGQGTTVTVSS

SEQ ID NO: 3506 - protein, 11 aa, Artificial Sequence
  Synthetic
ARDIVVYGMDV

SEQ ID NO: 3507 - protein, 108 aa, Artificial Sequence
  Synthetic
DIQLTQSPSFLSASVGDRVAITCRASQGISSHLAWYQQKPGKAPKLLIYAASTLQSGVPSRFSGSGSGTEFTLTISSLQPEDFATYYCQQLNSYPPYTFGQGTKLEIK

SEQ ID NO: 3508 - protein, 10 aa, Artificial Sequence
  Synthetic
QQLNSYPPYT

SEQ ID NO: 3509 - protein, 124 aa, Artificial Sequence
  Synthetic
EVQLVESGGGLVQPGGSLRLSCAASGLAFSSHDMHWVRLVIGKGLEWVSGMGTSGDTYYLDSVKGRFTISRDNAKNSLYLQMNSLRAGDTGVYYCARGKDSSGWARYYYYMDVWGKGTTVTVSS

SEQ ID NO: 3510 - protein, 18 aa, Artificial Sequence
  Synthetic
ARGKDSSGWARYYYYMDV

SEQ ID NO: 3511 - protein, 108 aa, Artificial Sequence
  Synthetic
DIQMTQSPSSLSASLGDRVSITCRASQSIITYLNWYQQKPGKAPKLLIYAASSLQSGAPSRFTGSGSGTDFTLTISSLQPEDFGTYYCQQSYSAPPWTFGPGTKVEIK

SEQ ID NO: 3512 - protein, 10 aa, Artificial Sequence
  Synthetic
QQSYSAPPWT

SEQ ID NO: 3513 - protein, 124 aa, Artificial Sequence
  Synthetic
EVQLVESGGDLTQPGGSLRLSCAASGFTFSSYDMHWVRQATGKGLEWVSGIGTSGDTYYADSVKGRFTISRENAKNSLFLQMNNLRAGDTATYYCARTEYAWGSYRSYWYFDLWGRGTQVTVSS

SEQ ID NO: 3514 - protein, 18 aa, Artificial Sequence
  Synthetic
ARTEYAWGSYRSYWYFDL

SEQ ID NO: 3515 - protein, 108 aa, Artificial Sequence; identical to SEQ ID NO: 180
  Synthetic

SEQ ID NO: 3516 - protein, 10 aa, Artificial Sequence
  Synthetic
QQSYSAPPWT

SEQ ID NO: 3517 - protein, 127 aa, Artificial Sequence; identical to SEQ ID NO: 137
  Synthetic

SEQ ID NO: 3518 - protein, 20 aa, Artificial Sequence
  Synthetic
ARDSEFSTSWFSRGYHGMDV

SEQ ID NO: 3519 - protein, 112 aa, Artificial Sequence; identical to SEQ ID NO: 138
  Synthetic

SEQ ID NO: 3520 - protein, 9 aa, Artificial Sequence
  Synthetic
MQALQTPPT

SEQ ID NO: 3521 - protein, 122 aa, Artificial Sequence
  Synthetic
EVQLVESGGGLVQPGGSLRLSCSASGFAFSAYDIHWVRQVPGKGLEWVSVIGTAGDTYYSDSVKGRFTISRENAKNSLYLQMNNLRAGDTAVYYCARGNFDSSGFYSFLDYWGQGTVVTVSS

SEQ ID NO: 3522 - protein, 16 aa, Artificial Sequence
  Synthetic
ARGNFDSSGFYSFLDY

SEQ ID NO: 3523 - protein, 107 aa, Artificial Sequence
  Synthetic
DIQMTQSPSSLSASVGDRVTITCRASQSIGNYLNWYQQKPGKAPKLLIYAASSLQSGVPSRFSGSGSGTDFILTIRSLQPEDFATYFCQQSYVTPSWTFGQGTKVEV

SEQ ID NO: 3524 - protein, 10 aa, Artificial Sequence
  Synthetic
QQSYVTPSWT

SEQ ID NO: 3525 - protein, 123 aa, Artificial Sequence
  Synthetic
QVQLVESGGGVVQPGRSLRLSCAASGFTFSTYGMHWVRQAPGKGLEWVALILYDGSEKYYADSVTGRFTISRDNSKNTVFLQMNSLRVEDTAVYYCAKAGPPYASPTTLLDYWGQGTLVTVSP

SEQ ID NO: 3526 - protein, 16 aa, Artificial Sequence
  Synthetic
AKAGPPYASPTTLLDY

SEQ ID NO: 3527 - protein, 108 aa, Artificial Sequence
  Synthetic
DIQMTQSPSSLSASVGDRVTITCQASQDISNHLNWYQQKPGKAPKVLIYDASNLEAGVPSRFSGSGSGTDFTFTINSLQPEDIATYYCQQYDNVPPITFGQGTRLEIK

SEQ ID NO: 3528 - protein, 10 aa, Artificial Sequence
  Synthetic
QQYDNVPPIT

SEQ ID NO: 3529 - protein, 116 aa, Artificial Sequence; identical to SEQ ID NO: 153
  Synthetic

SEQ ID NO: 3530 - protein, 12 aa, Artificial Sequence
  Synthetic
ARLGGYRYGMDV

SEQ ID NO: 3531 - protein, 106 aa, Artificial Sequence; identical to SEQ ID NO: 154
  Synthetic

SEQ ID NO: 3532 - protein, 9 aa, Artificial Sequence
  Synthetic
LQYDNLPYS

SEQ ID NO: 3533 - protein, 122 aa, Artificial Sequence
  Synthetic
QLQLQESGPRLVKPSETLSLSCTVSSGPISGTSYYWGWIRQPPGKGLEWIASIYYSGTTNYNPPLKSRVTISLNTSRNEFSLKLTSVTAADTAVYYCVAMEGLYSVLFFGHWGQGTLVTVSS

SEQ ID NO: 3534 - protein, 14 aa, Artificial Sequence
  Synthetic
VAMEGLYSVLFFGH

SEQ ID NO: 3535 - protein, 106 aa, Artificial Sequence
  Synthetic
DIQMTQSPSSLSASVGDRVTITCRASQNINNYLNWYQQKPGRAPSLLIYAASSLQSGVPSRFSGSGSGTDFTLTISSLQREDFATYYCQQSYDAPWTFGQGTRVDI

SEQ ID NO: 3536 - protein, 9 aa, Artificial Sequence
  Synthetic
QQSYDAPWT

SEQ ID NO: 3537 - protein, 127 aa, Artificial Sequence; identical to SEQ ID NO: 195
  Synthetic

SEQ ID NO: 3538 - protein, 20 aa, Artificial Sequence
  Synthetic
AKVLGSYCSASSCHGQRPDY

SEQ ID NO: 3539 - protein, 108 aa, Artificial Sequence; identical to SEQ ID NO: 196
  Synthetic

SEQ ID NO: 3540 - protein, 10 aa, Artificial Sequence
  Synthetic
QQYDNVPPWT

SEQ ID NO: 3541 - protein, 119 aa, Artificial Sequence; identical to SEQ ID NO: 161
  Synthetic

SEQ ID NO: 3542 - protein, 13 aa, Artificial Sequence
  Synthetic
ARASGVLTTHFDS

SEQ ID NO: 3543 - protein, 108 aa, Artificial Sequence; identical to SEQ ID NO: 162
  Synthetic

SEQ ID NO: 3544 - protein, 10 aa, Artificial Sequence
  Synthetic
QQSYETPPWT

SEQ ID NO: 3545 - protein, 117 aa, Artificial Sequence
  Synthetic
EVQLVESGGGLVQPGGSLRLSCAASGFTVSRNYLNWVRQTPGKGLEWVSVIYSGGSTFYADSVKGRFTISRDNSKNTVYLQMSSLRAEDTAVYYCAREISSGRFDYWGLGTLVTVSS

SEQ ID NO: 3546 - protein, 11 aa, Artificial Sequence
  Synthetic
AREISSGRFDY

SEQ ID NO: 3547 - protein, 108 aa, Artificial Sequence
  Synthetic
DIQMTQSPSSLSASVGDRVSITCQASQGISNYLNWYHQKPGKAPKLLIYDASNLETGVPSRFSGSGSGTDFTFTISSLQPEDIGTYYCQQYDNVPRHTFGQGTKLEIK

SEQ ID NO: 3548 - protein, 10 aa, Artificial Sequence
  Synthetic
QQYDNVPRHT

SEQ ID NO: 3549 - protein, 117 aa, Artificial Sequence
  Synthetic
EVQLVESGGGLVQPGGSLRLSCAASGLTVTSNYMTWVRQAPGKGLEWVSIFYPGGTTFYADSVKGRFTSSRASSMNTLYLQMNSLKTEDTAVYYCARGYGDYYFDFWGQGTLVTVSS

SEQ ID NO: 3550 - protein, 11 aa, Artificial Sequence
  Synthetic
ARGYGDYYFDF

SEQ ID NO: 3551 - protein, 103 aa, Artificial Sequence
  Synthetic
DIQLTQSPVSLSASVGDRVTITCRASQGISSDLAWYQQKSGKAPKLLIYAASTLQSGVPSRFSGSGSGTEFTLIISSLQPEDFATYYCQHQLTFGGGARVEIK

SEQ ID NO: 3552 - protein, 5 aa, Artificial Sequence
  Synthetic
QHQLT

SEQ ID NO: 3553 - protein, 128 aa, Artificial Sequence
  Synthetic
EVQLVESGGVLVRPGGSLRLSCAASGFTFSTYDMHWVRQAPGKGLEWVSAIGTAGDTYYPDSVKGRFTISRDNANNSLYLQMNTLSAGDTALYYCARVVHYSLSVRGRYSYSYYMDVWGKGTAVTVSS

SEQ ID NO: 3554 - protein, 22 aa, Artificial Sequence
  Synthetic
ARVVHYSLSVRGRYSYSYYMDV

SEQ ID NO: 3555 - protein, 108 aa, Artificial Sequence
  Synthetic
DIQMTQSPSSLSASVGDRVTITCRASQSINNYLNWYQQKPGKAPKLLIYASSSLQSGVPSRFSGSGSGTDYTLTIGSLQPEDFATYYCQQTYSNPQNTFGQGTKLEIK

SEQ ID NO: 3556 - protein, 10 aa, Artificial Sequence
  Synthetic
QQTYSNPQNT

SEQ ID NO: 3557 - protein, 125 aa, Artificial Sequence
  Synthetic
EVQLVESGGGLIQPGRSLRLSCTASGFSVGDYAMSWFRQAPGKGLEWVGFLRNQHYGGTAEYAASVKGRFSISTDASKNIVYLQMDSLKTEDTAVYYCARNDRYIVIVPAEMLYWGQGTMVAVSS

SEQ ID NO: 3558 - protein, 16 aa, Artificial Sequence
  Synthetic
ARNDRYIVIVPAEMLY

SEQ ID NO: 3559 - protein, 108 aa, Artificial Sequence; identical to SEQ ID NO: 218
  Synthetic

SEQ ID NO: 3560 - protein, 10 aa, Artificial Sequence
  Synthetic
QQYSNWPPIT

SEQ ID NO: 3561 - protein, 116 aa, Artificial Sequence; identical to SEQ ID NO: 191
  Synthetic

SEQ ID NO: 3562 - protein, 14 aa, Artificial Sequence
  Synthetic
ARGGSSSWLWYFDL

SEQ ID NO: 3563 - protein, 108 aa, Artificial Sequence
  Synthetic
DIQMTQSPSSLSASVGDRVTITCRASQSISSHLNWYQQKPGKVPKLLIYAASTLQSGVPSRFSGSGSGTDFTLTISSLQPEDFATYYCQQSYSMPPVTFGQGTRLDIK

SEQ ID NO: 3564 - protein, 10 aa, Artificial Sequence
  Synthetic
QQSYSMPPVT

SEQ ID NO: 3565 - protein, 129 aa, Artificial Sequence
  Synthetic
QVQLVQSGAEVKKPGASVKVSCKASGYTFPPYAVHWVRQAPGQSLEWMGGINAGNGNTEYSQRFQGRVTITRDTSASTVYMELSSLRSEDTAVYYCARGGRYYYDRSGYLKSDDVFDFWGQGTVVRVSS

SEQ ID NO: 3566 - protein, 22 aa, Artificial Sequence
  Synthetic
ARGGRYYYDRSGYLKSDDVFDF

SEQ ID NO: 3567 - protein, 107 aa, Artificial Sequence
  Synthetic
DIQMTQSPSSLSASIGDRVTITCQASQDISHYLNWYQQKPGEAPKLLMYDASFLETRVPSRFSGSGSRTDFTFTISSLQPEDIATYYCQQYHSLPLTFGGGTKLEIK

SEQ ID NO: 3568 - protein, 9 aa, Artificial Sequence
  Synthetic
QQYHSLPLT

SEQ ID NO: 3569 - protein, 128 aa, Artificial Sequence
  Synthetic
EVQLVESGGDLVKPGGSLRLSCAASGFTFTNAWMSWVRQAPGKGLEWVGRIKSKTHGGTTDYAAPVKGRFTISRNDSKNTLYLQMNSLKTEDTAVYYCSTVDVEAIWELLENDAFDLWGQGTMVTVSS

SEQ ID NO: 3570 - protein, 19 aa, Artificial Sequence
  Synthetic
STVDVEAIWELLENDAFDL

SEQ ID NO: 3571 - protein, 108 aa, Artificial Sequence
  Synthetic
EIVLTQSPGTLSLSPGERATLSCRASQSVSSTYLAWYQQKPGQAPRLLIYGALSRAPGVPDRFSGSGSGTDFTLTISRLEPEDFAVYYCQQCYSSPFTFGPGTKVDIK

SEQ ID NO: 3572 - protein, 9 aa, Artificial Sequence
  Synthetic
QQCYSSPFT

SEQ ID NO: 3573 - protein, 123 aa, Artificial Sequence; identical to SEQ ID NO: 157
  Synthetic

SEQ ID NO: 3574 - protein, 16 aa, Artificial Sequence
  Synthetic
AKAVPTSCYVFCALDI

SEQ ID NO: 3575 - protein, 108 aa, Artificial Sequence
  Synthetic
DIQMTQSPVSLSASVGDRVTITCRASQGISNYLAWYQQSPGKVPKLLIYAASTLQSGVPSRFSGSGSGTDFTLTISSLQPEDVATYYCQKYNSGPALTFGGGTKVEIK

SEQ ID NO: 3576 - protein, 10 aa, Artificial Sequence
  Synthetic
QKYNSGPALT

SEQ ID NO: 3577 - protein, 125 aa, Artificial Sequence
  Synthetic
EVQLVESGGGLVKPGRSLRLSCTPSGFTFGDYSMTWFRQAPGKGLEWVGFIRSQVYGGTTQYAASVKGRFTISRDDSKSIAYLQMNSLKTEDTAVYYCTRLRQVQGVPGYYFDYWGQGTEVTVSS

SEQ ID NO: 3578 - protein, 16 aa, Artificial Sequence
  Synthetic
TRLRQVQGVPGYYFDY

SEQ ID NO: 3579 - protein, 106 aa, Artificial Sequence
  Synthetic
EIVMTQSPATLSVSPGERATLSCRASQSVSSNLAWYQQKPGQAPRLLIYGASTRATNIPPRFSGSGSGTEFTLTISSLQSEDFAVYYCQQYNNWFAFGGGTKVEIK

SEQ ID NO: 3580 - protein, 8 aa, Artificial Sequence
  Synthetic
QQYNNWFA

SEQ ID NO: 3581 - protein, 124 aa, Artificial Sequence
  Synthetic
EVQLVESGGNLVQPGGSLRLSCAASGFSFSTYDMHWVRQGTGKGLEWVSTIGTAGDTYYLDSVKGRFTISREDGKNSLFLQMNSLRAGDTAVYYCARGTHTSSSGRFYYYLDVWGKGTTVTVSS

SEQ ID NO: 3582 - protein, 18 aa, Artificial Sequence
  Synthetic
ARGTHTSSSGRFYYYLDV

SEQ ID NO: 3583 - protein, 108 aa, Artificial Sequence
  Synthetic
DIQMTQSPSSLSASVGDRVTLTCRASQTIGTFLNWYQHKPGKAPKLLIYASSTLQSGVPTRFSGSGSGTAFTLTISRLLPEDIATYYCQQSYTSPQYTFGLGTKLQIK

SEQ ID NO: 3584 - protein, 10 aa, Artificial Sequence
  Synthetic
QQSYTSPQYT

SEQ ID NO: 3585 - protein, 126 aa, Artificial Sequence
  Synthetic
QVQLVQSGAEVKKPGASVKVSCKTSAHTFTSYDINWVRQATGLGLEWMGWMNPNSGNTDYAQKFQGRLTMTRDTSISTAYMELSSLRSEDTAVYYCVSRTGSSRGTGYFYKYMDVWGKGTTVVVSS

SEQ ID NO: 3586 - protein, 19 aa, Artificial Sequence
  Synthetic
VSRTGSSRGTGYFYKYMDV

SEQ ID NO: 3587 - protein, 112 aa, Artificial Sequence
  Synthetic
DIVMTQSPLSLPVTPGEPASISCRSSQSLLHSNGNNYLDWYLQKPGQSPQLLIYLGSNRASGVPDRFSGSGSGTDFTLKISRVEAEDVGVYYCMQALQTPPTFGQGTRLEIK

SEQ ID NO: 3588 - protein, 9 aa, Artificial Sequence
  Synthetic
MQALQTPPT

SEQ ID NO: 3589 - protein, 125 aa, Artificial Sequence; identical to SEQ ID NO: 165
  Synthetic

SEQ ID NO: 3590 - protein, 17 aa, Artificial Sequence
  Synthetic
AREGVAVGGNGVDGFDM

SEQ ID NO: 3591 - protein, 107 aa, Artificial Sequence
  Synthetic
DIQMTQSPSSLSSSVGDRVTITCRASQSIGIYLNWYQQKPGKVPNLLIYAASTLQTGAPSRFSGSGSGTDFILSISSLQPEDFATYYCQQTYSVPYTFGQGTKVEIK

SEQ ID NO: 3592 - protein, 9 aa, Artificial Sequence
  Synthetic
QQTYSVPYT

SEQ ID NO: 3593 - protein, 118 aa, Artificial Sequence
  Synthetic
EVQLVESGGGLVQPGGSLRLSCAASEITVSRNYMIWVRQAPGRGLEWVSLIYSGGSTFYADSVKGRFTISRDNSKNTLYLQMNSLRAEDTAVYYCARDRSTRGAFDYWGQGALVTVSS

SEQ ID NO: 3594 - protein, 12 aa, Artificial Sequence
  Synthetic
ARDRSTRGAFDY

SEQ ID NO: 3595 - protein, 107 aa, Artificial Sequence
  Synthetic
DIQMTQSPSSLSASVGDRVTITCQAGQDISNYLNWYQQKPGKAPKLLIYDASNLETGVPSRFSGSGSGTDFTFTINSLQPEDIATYYCHQSDNLPPTFGGGTKVEIK

SEQ ID NO: 3596 - protein, 9 aa, Artificial Sequence
  Synthetic
HQSDNLPPT

SEQ ID NO: 3597 - protein, 119 aa, Artificial Sequence
  Synthetic
EVQLVESGGGLVQPGGSLRLSCAASGFTFSSYDMHWVRQGTGKGLEWVSAIGTAGDTYYPDSVKGRFTISRQNAKNSLYLQMNSLRAGDTAVYYCARDTGEGGWYFDLWGRGTLVTVSS

SEQ ID NO: 3598 - protein, 13 aa, Artificial Sequence
  Synthetic
ARDTGEGGWYFDL

SEQ ID NO: 3599 - protein, 108 aa, Artificial Sequence
  Synthetic
DIQMTQSPSSLSASVGDRVTITCRASLSIGSFLNWYQQKPGKAPNLLIYAASSLQSGVPSRFSGSGSGTDFTLTISSLQPEDFATYYCQQSYSTPPITFGQGTRLEIK

SEQ ID NO: 3600 - protein, 10 aa, Artificial Sequence
  Synthetic
QQSYSTPPIT

SEQ ID NO: 3601 - protein, 125 aa, Artificial Sequence
  Synthetic
EVQLVESGGGVLRPGGSLRLSCVGSGFRFEDHGMSWVRQVPGKGLEWVSGINWNGGSTGYADSVKGRFTISRDNAKNSLYLQMNSLRAEDTALYHCVRDGHYDTSGFWNDPFDIWGQGTMVSVSS

SEQ ID NO: 3602 - protein, 18 aa, Artificial Sequence
  Synthetic
VRDGHYDTSGFWNDPFDI

SEQ ID NO: 3603 - protein, 108 aa, Artificial Sequence
  Synthetic
EIVLTQSPGTLSLSPGERATLSCRASQIVSSSYLAWYQQKPRQAPRLLIYGASSRATGIPDRFSGSGSGTDFTLTISRLEPEDFAVYYCQQYGGSPLTFGGGSNVELK

SEQ ID NO: 3604 - protein, 9 aa, Artificial Sequence
  Synthetic
QQYGGSPLT

SEQ ID NO: 3605 - protein, 129 aa, Artificial Sequence
  Synthetic
QVQLVQSGAEVKKPGASVKVSCKTSGYSFIRYGISWVRQVPGQGLEWMGWTTPHNGASNYAQNLQGRVTMTTDTSTSTAYMELRSLRSDDTAVYFCARVDPPSQWLVPTVPKCDYFDHWGQGTLVTVSS

SEQ ID NO: 3606 - protein, 22 aa, Artificial Sequence
  Synthetic
ARVDPPSQWLVPTVPKCDYFDH

SEQ ID NO: 3607 - protein, 105 aa, Artificial Sequence
  Synthetic
DIQMTQSPSTLSASVGDRVTITCRASQSISSWLAWYQQKPGKAPKLLIYKASSLEGGVPLRFSGSGSGTEFTLTISSLQPDDFATYYCQQYISDPSFGQGTKVEI

SEQ ID NO: 3608 - protein, 8 aa, Artificial Sequence
  Synthetic
QQYISDPS

SEQ ID NO: 3609 - protein, 118 aa, Artificial Sequence
  Synthetic
QVQLVESGGGLVKPGGSLRLSCAASGFTFSDYQMTWIRQAPGKGLEWVSYITHTANSKSYADSVKGRFTVSRDNAKNSLYLQMNSLTAEDTAVYYCARDRGEGARFDYWGQGTLVTVS

SEQ ID NO: 3610 - protein, 12 aa, Artificial Sequence
  Synthetic
ARDRGEGARFDY

SEQ ID NO: 3611 - protein, 107 aa, Artificial Sequence
  Synthetic
DIQMTQSPSSLSAFVGDRVTITCQASQDIRKYLNWYQQKPGKAPKLLIYTASNLQTGVPSRFSGSGSGTDFTFTISSLQPEDTATYFCQQYDNLPLTFGGGTTVELK

SEQ ID NO: 3612 - protein, 9 aa, Artificial Sequence
  Synthetic
QQYDNLPLT

SEQ ID NO: 3613 - protein, 127 aa, Artificial Sequence; identical to SEQ ID NO: 193
  Synthetic

SEQ ID NO: 3614 - protein, 21 aa, Artificial Sequence
  Synthetic
VRGDTLVQGVIKAYYYYFMDV

SEQ ID NO: 3615 - protein, 108 aa, Artificial Sequence
  Synthetic
  misc_feature (9)..(9): Xaa can be any naturally occurring amino acid
DIQMTQSPXSLSASVGDRVTITCRASQNISRYLNWYQQKPGKAPRLLIYAASTLQSGVPSRFSASGSGTDFTLTITNLQPEDFAVYYCQQTYVMPPYTLAQGTKLEIK

SEQ ID NO: 3616 - protein, 10 aa, Artificial Sequence
  Synthetic
QQTYVMPPYT

SEQ ID NO: 3617 - protein, 116 aa, Artificial Sequence; identical to SEQ ID NO: 153
  Synthetic

SEQ ID NO: 3618 - protein, 12 aa, Artificial Sequence
  Synthetic
ARLGGYRYGMDV

SEQ ID NO: 3619 - protein, 106 aa, Artificial Sequence; identical to SEQ ID NO: 154
  Synthetic

SEQ ID NO: 3620 - protein, 9 aa, Artificial Sequence
  Synthetic
LQYDNLPYS

SEQ ID NO: 3621 - protein, 121 aa, Artificial Sequence
  Synthetic
QVQLVQSGAEVKKPGSSVKVSCEASGGTFSSDSINWVRQAPGQGLEWMGRIIPIFGATNYAQKFQGRVTITADKSTDTVYMEVSSLTSEDTAVYYCARGGIAVGGWWFDPWGQGTLITVSS

SEQ ID NO: 3622 - protein, 14 aa, Artificial Sequence
  Synthetic
ARGGIAVGGWWFDP

SEQ ID NO: 3623 - protein, 108 aa, Artificial Sequence
  Synthetic
EIVMTQSPATLSVSPGERATLSCRASESVSSKLAWYQQKPGQAPRLLIYGASTRATGISARFSGSGSGTDFTLTISSLESEDFAVYYCQQYNHWPPNTFGQGTKLETK

SEQ ID NO: 3624 - protein, 10 aa, Artificial Sequence
  Synthetic
QQYNHWPPNT

SEQ ID NO: 3625 - protein, 119 aa, Artificial Sequence
  Synthetic
EVQLVESGGGLVQPGGSLRLSCAASGFTFSTYDMHWVRQVIGKGLEWVSGIGTAGDTYYLDSVKGRFTISRGNDKNSLYLQMNSLRVGDTAVYYCVRASGLPTTHFDYWGQGTLVTVSS

SEQ ID NO: 3626 - protein, 13 aa, Artificial Sequence
  Synthetic
VRASGLPTTHFDY

SEQ ID NO: 3627 - protein, 108 aa, Artificial Sequence
  Synthetic
DIQMTQSPSSLSAAIGDRVTITCRASQSIGRFLNWHQQKLGRAPKLLIYTASTLHSGVPSRISGSGSGTDFTLTINNLQPEDFATYYCQQSYETPPWTFGQGTKVEIK

SEQ ID NO: 3628 - protein, 10 aa, Artificial Sequence
  Synthetic
QQSYETPPWT

SEQ ID NO: 3629 - protein, 120 aa, Artificial Sequence; identical to SEQ ID NO: 183
  Synthetic

SEQ ID NO: 3630 - protein, 14 aa, Artificial Sequence
  Synthetic
ARGDSSGLYTFFDY

SEQ ID NO: 3631 - protein, 107 aa, Artificial Sequence; identical to SEQ ID NO: 184
  Synthetic

SEQ ID NO: 3632 - protein, 10 aa, Artificial Sequence
  Synthetic
QQSYSTLGLT

SEQ ID NO: 3633 - protein, 125 aa, Artificial Sequence; identical to SEQ ID NO: 159
  Synthetic

SEQ ID NO: 3634 - protein, 16 aa, Artificial Sequence
  Synthetic
TRLRQVQGVPGYYFDQ

SEQ ID NO: 3635 - protein, 106 aa, Artificial Sequence; identical to SEQ ID NO: 160
  Synthetic

SEQ ID NO: 3636 - protein, 8 aa, Artificial Sequence
  Synthetic
QEYDNWFA

SEQ ID NO: 3637 - protein, 120 aa, Artificial Sequence; identical to SEQ ID NO: 215
  Synthetic

SEQ ID NO: 3638 - protein, 13 aa, Artificial Sequence
  Synthetic
ARAQTPEFGELLY

SEQ ID NO: 3639 - protein, 108 aa, Artificial Sequence; identical to SEQ ID NO: 216
  Synthetic

SEQ ID NO: 3640 - protein, 10 aa, Artificial Sequence
  Synthetic
QQSYGPPTYS

SEQ ID NO: 3641 - protein, 117 aa, Artificial Sequence
  Synthetic
EVQLVESGGGLIQPGGSLGLSCAASELTVSSNYMTWVRQAPGKGLEWVSLIYPGGSTYYADSVKGRFTISRDNSKNTLYLQMNSLRAEDTALYYCARLRPPYYMDVWGKGTTVTVSS

SEQ ID NO: 3642 - protein, 11 aa, Artificial Sequence
  Synthetic
ARLRPPYYMDV

SEQ ID NO: 3643 - protein, 108 aa, Artificial Sequence
  Synthetic
DIQLTQSPSFLSASVGDRVTITCRASQGISSYLAWYQQKPGEAPKLLIYAASTLQSGVPSRFSGSGSGTEFSLTISSLHPEDFATYYCQHLDGYPPVTFGGGTKVEIK

SEQ ID NO: 3644 - protein, 10 aa, Artificial Sequence
  Synthetic
QHLDGYPPVT

SEQ ID NO: 3645 - protein, 128 aa, Artificial Sequence; identical to SEQ ID NO: 171
  Synthetic

SEQ ID NO: 3646 - protein, 19 aa, Artificial Sequence
  Synthetic
TTVDVQGIWELLENDAFDI

SEQ ID NO: 3647 - protein, 108 aa, Artificial Sequence; identical to SEQ ID NO: 172
  Synthetic

SEQ ID NO: 3648 - protein, 9 aa, Artificial Sequence
  Synthetic
QQSDRSPFT

SEQ ID NO: 3649 - protein, 114 aa, Artificial Sequence
  Synthetic
EVQLVESGGDLVKSGRSLRLSCSTSGFTFGDYGMSWFRQAPGKGLEWVGFIRSRVLGGTTQYAASVRGRFTISRDDSQSIAYMQMNSLKTEDTAVYYCTRLSLHQGPIGLPPGT

SEQ ID NO: 3650 - skipped

SEQ ID NO: 3651 - protein, 106 aa, Artificial Sequence
  Synthetic
EIVMTQSPATLSVSPGERATLSCRASQSVSSNLAWYQEKPGQGPRLLIYGASTRATGIPARFNGSGSGTEFTLTITSLQSEDFAVYYCQQYNNWFAFGGGTKIEIK

SEQ ID NO: 3652 - protein, 8 aa, Artificial Sequence
  Synthetic
QQYNNWFA

SEQ ID NO: 3653 - protein, 123 aa, Artificial Sequence; identical to SEQ ID NO: 157
  Synthetic

SEQ ID NO: 3654 - protein, 16 aa, Artificial Sequence
  Synthetic
AKAVPTSCYVFCALDI

SEQ ID NO: 3655 - protein, 108 aa, Artificial Sequence; identical to SEQ ID NO: 158
  Synthetic

SEQ ID NO: 3656 - protein, 10 aa, Artificial Sequence
  Synthetic
QKYNSGPALT

SEQ ID NO: 3657 - protein, 115 aa, Artificial Sequence
  Synthetic
EVQLVESGGGLIQPGGSLRLSCAASGLTVSSNYMSWVRQAPGKGLEWVSVIFSGGSSFYADSVKGRFTISRDNSKNTLYLQMNSLRAEDTAVYYCTRLPYGDYAWGQGTLVTVSS

SEQ ID NO: 3658 - protein, 9 aa, Artificial Sequence
  Synthetic
TRLPYGDYA

SEQ ID NO: 3659 - protein, 107 aa, Artificial Sequence
  Synthetic
DIQMTQSPSSLSASVGDSVTITCQASQDISKYLNWYQQKTGKAPKLLIYDASNLETGVPSRFSGSGSGTDFTFTISSLQPEDIGTYYCLQYDNLPCTFGQGTKLEIK

SEQ ID NO: 3660 - protein, 9 aa, Artificial Sequence
  Synthetic
LQYDNLPCT

SEQ ID NO: 3661 - protein, 117 aa, Artificial Sequence; identical to SEQ ID NO: 173
  Synthetic

SEQ ID NO: 3662 - protein, 11 aa, Artificial Sequence
  Synthetic
ARDLGDSRLDY

SEQ ID NO: 3663 - protein, 109 aa, Artificial Sequence; identical to SEQ ID NO: 174
  Synthetic

SEQ ID NO: 3664 - protein, 11 aa, Artificial Sequence
  Synthetic
QQLDSYPPGYS

SEQ ID NO: 3665 - protein, 117 aa, Artificial Sequence
  Synthetic
EVQLVESGGGLVQPGGSLRLSCAASGFTVSSNYMSWVRQAPGKGLEWVSVIYSGGSTYYADSVKGRFTISRDDSKNTLYLQMNSLRAEDTAVYYCARDLDYYGMDVWGQGTTVTISS

SEQ ID NO: 3666 - protein, 11 aa, Artificial Sequence
  Synthetic
ARDLDYYGMDV

SEQ ID NO: 3667 - protein, 108 aa, Artificial Sequence
  Synthetic
DIQLTQSPSFLSASVGDRVTITCRASQGISNYLAWYQQKPGKAPKLLIYAASTLQSGVPSRFSGSGSGTEFTLTISSLQPEDFATYYCQLLNSHPRTAFGQGTKLEIK

SEQ ID NO: 3668 - protein, 10 aa, Artificial Sequence
  Synthetic
QLLNSHPRTA

SEQ ID NO: 3669 - protein, 123 aa, Artificial Sequence
  Synthetic
EVQLVESGGGLVQPDGSLRLSCAAFGFRFDEYAMHWVRQVPGKGLEWVSTISWDSSSIAYADPVRGRFTISRDNDKNYVYLQMNRLRAEDTALYYCAKEHQWGAMTGSNWFDPWGQGTLVTVS

SEQ ID NO: 3670 - protein, 17 aa, Artificial Sequence
  Synthetic
AKEHQWGAMTGSNWFDP

SEQ ID NO: 3671 - protein, 107 aa, Artificial Sequence
  Synthetic
DIQMTQSPSSVSASVGDRVTITCRASQDVSSWLAWYQQKPGKAPRLLIYGATSLQSGVPSRFSGSGSGTGFTLTISSLQPEDFATYYCQQANSYPLTFGGGTKVEIK

SEQ ID NO: 3672 - protein, 9 aa, Artificial Sequence
  Synthetic
QQANSYPLT

SEQ ID NO: 3673 - protein, 132 aa, Artificial Sequence
  Synthetic
QVQLVQSGAEVKKPGASVKVSCKASGYPFTSYDINWVRQAAGQGLEWMGWLNPVSDNKGYSQQFQGRVTLTRDTSINTVYMELSGLRSEDTAVYYCVRMAKTPGIYDFLTTDGPYFFGLDVWGQGTTVIVSS

SEQ ID NO: 3674 - protein, 25 aa, Artificial Sequence
  Synthetic
VRMAKTPGIYDFLTTDGPYFFGLDV

SEQ ID NO: 3675 - protein, 110 aa, Artificial Sequence
  Synthetic
QFVLTQPASVSGSPRQSITISCTGASSDVGNYNLVSWYQQHPGKAPKLIIYEVTKRPSGVSDRFSGSKSGNTASLTISGLQAEDESDYYCCSYAGGGTLVFGGGTKLTVL

SEQ ID NO: 3676 - protein, 10 aa, Artificial Sequence
  Synthetic
CSYAGGGTLV

SEQ ID NO: 3677 - protein, 124 aa, Artificial Sequence; identical to SEQ ID NO: 185
  Synthetic

SEQ ID NO: 3678 - protein, 17 aa, Artificial Sequence
  Synthetic
ATGKGYSSSSAAYYFDH

SEQ ID NO: 3679 - protein, 112 aa, Artificial Sequence
  Synthetic
QFVLTQPPSVSGAPGQRVTISCTGTNSNIGAGYDIHWYQQLPGTAPKLLIYGSNNRPSGVPDRFSGSKSGTSASLAITGLQAEDEADYYCQSYDSSLSGSEVFGGGTKLTVL

SEQ ID NO: 3680 - protein, 12 aa, Artificial Sequence
  Synthetic
QSYDSSLSGSEV

SEQ ID NO: 3681 - protein, 121 aa, Artificial Sequence; identical to SEQ ID NO: 169
  Synthetic

SEQ ID NO: 3682 - protein, 15 aa, Artificial Sequence
  Synthetic
ARLLSTEWSFNWFDP

SEQ ID NO: 3683 - protein, 107 aa, Artificial Sequence
  Synthetic
SYVLTQPPSVSVSPGQTASITCSGDTLGDKYACWYQQKPGQSPLLVIYQNNKRPSGIPERFSGSNSGNTATLTISGTQAMDEADYYCQAWDSSTAYVFGTGTKVTVL

SEQ ID NO: 3684 - protein, 10 aa, Artificial Sequence
  Synthetic
QAWDSSTAYV

SEQ ID NO: 3685 - protein, 118 aa, Artificial Sequence
  Synthetic
EVQLVESGGGLIQPGGSLRLSCAASGFSVSNNYMTWVRQAPGRGLEWVSVIYSGGGTHYADSVKGRFTISRHNSKNTLYLQMKSLKVEDTAVYYCARLTMSTYYFDFWGQGTLVTVSS

SEQ ID NO: 3686 - protein, 12 aa, Artificial Sequence
  Synthetic
ARLTMSTYYFDF

SEQ ID NO: 3687 - protein, 110 aa, Artificial Sequence
  Synthetic
SYVLTQPPSVSVAPGQTARLTCGGDEIGSRSVHWYQQKPGRAPVLVVYEDSARPSGIPDRFSGSNSGNTGTLTINSVEAGDEADYYCQVWESFRDHQDWVFGGGTRLTVL

SEQ ID NO: 3688 - protein, 13 aa, Artificial Sequence
  Synthetic
QVWESFRDHQDWV

SEQ ID NO: 3689 - protein, 128 aa, Artificial Sequence
  Synthetic
QVQLVQSGAEVKKPGASVKVSCKASGYIFTGYYMHWVRQAPGQGLEWMGRINPNSGGSRYAEKFQGRVTMTRDTSIITAFMELRGLKSDDTAVYYCAREPIEAVPAGIIVNYYYMDVWGNGTPVAVSS

SEQ ID NO: 3690 - protein, 21 aa, Artificial Sequence
  Synthetic
AREPIEAVPAGIIVNYYYMDV

SEQ ID NO: 3691 - protein, 111 aa, Artificial Sequence
  Synthetic
QFVLTQPASVSGSPGQSITISCTGTSSDVGGYNYVSWYQQHPGKAPKLMIYDVTSRPSGVSDRFSGSKSGTTASLTISGLQAEDEADYYCSSFTSAFTLVVFGGGTKLTVL

SEQ ID NO: 3692 - protein, 11 aa, Artificial Sequence
  Synthetic
SSFTSAFTLVV

SEQ ID NO: 3693 - protein, 118 aa, Artificial Sequence
  Synthetic
EVQLVQSGAEVKQPGESLKISCKGSGYSFISNWIGWVRQMPGKGLEWMGIIWPGDSDTRYSPSFQGQVTISADKSITTAYLHWRSLKASDTAIYYCVRRGSSWEIDYWGQGTLVTVSS

SEQ ID NO: 3694 - protein, 11 aa, Artificial Sequence
  Synthetic
VRRGSSWEIDY

SEQ ID NO: 3695 - protein, 110 aa, Artificial Sequence
  Synthetic
QFVLTQPLSASGTPGQWVTISCSGSTSNIGSYPVNWYQQLPGTAPQLLIYNNNQRPSGVPDRFSGSKSGTAASLAISGLQSEDEADYYCAAWDDSLDGWVFGGGTKLTVL

SEQ ID NO: 3696 - protein, 11 aa, Artificial Sequence
  Synthetic
AAWDDSLDGWV

SEQ ID NO: 3697 - protein, 124 aa, Artificial Sequence
  Synthetic
QVQLVQSGAEVRKPGSSVKVSCKASGDTFSTYIMSWVRQAPGQGLEWMGRIIPILGIANYAQNFQGRVTITADRSTTTAHMELTSLTSEDTAVYYCVRGVGYSNSGSNWYFDLWGRGTLVTVSS

SEQ ID NO: 3698 - protein, 17 aa, Artificial Sequence
  Synthetic
VRGVGYSNSGSNWYFDL

SEQ ID NO: 3699 - protein, 111 aa, Artificial Sequence
  Synthetic
QFVLTQSPSVSGAPGQRVTISCTGSSSNIGAGYDVHWYQNLPGTAPKLLIYANNNRPSGVPDRFSGSKSGTSASLAITGLQAEDEADYYCQSYDSSLSGSVFGGGTKLTVL

SEQ ID NO: 3700 - protein, 11 aa, Artificial Sequence
  Synthetic
QSYDSSLSGSV

SEQ ID NO: 3701 - protein, 119 aa, Artificial Sequence
  Synthetic
EVQLVQSGAEVKKPGESLTISCKDSGNSFTIYWIGWVRQMPGKGLEWMGMIYPGDSGTRYSPSFEGQVTISADESINTAYLQWRSLKASDTAMYYCVRGIAVDWYFDLWGRGTLVTVSA

SEQ ID NO: 3702 - protein, 12 aa, Artificial Sequence
  Synthetic
VRGIAVDWYFDL

SEQ ID NO: 3703 - protein, 111 aa, Artificial Sequence
  Synthetic
QFVLTQPPSVSGAPGQRVTISCTGSSSNIGAGFDVHWYQQLPGTAPKLLIYGNNNRPSGVPDRFSGSKSATSASLAITGLQAEDEADYYCQSSDSSLSGLYVFGTGTNVIV

SEQ ID NO: 3704 - protein, 12 aa, Artificial Sequence
  Synthetic
QSSDSSLSGLYV

SEQ ID NO: 3705 - protein, 118 aa, Artificial Sequence; identical to SEQ ID NO: 181
  Synthetic

SEQ ID NO: 3706 - protein, 12 aa, Artificial Sequence
  Synthetic
ARLTMTTYYFDS

SEQ ID NO: 3707 - protein, 110 aa, Artificial Sequence
  Synthetic
SYVLTQPPSVSLAPGQTARITCGGNGIGSKSVHWYQQKPGRAPVLVVYDDSVRPSGTPARFSGANSGNTATLTISRVEAGDEADYYCQVWDSFRDHQDWVFGGGTKLTVL

SEQ ID NO: 3708 - protein, 13 aa, Artificial Sequence
  Synthetic
QVWDSFRDHQDWV

SEQ ID NO: 3709 - protein, 124 aa, Artificial Sequence; identical to SEQ ID NO: 155
  Synthetic

SEQ ID NO: 3710 - protein, 17 aa, Artificial Sequence
  Synthetic
ARGVGYSGSGSNWYFDL

SEQ ID NO: 3711 - protein, 110 aa, Artificial Sequence
  Synthetic
QFVLTQPPSVSGAPGQRVTISCTGSSSNIGAGYDVHWYQQLPGTAPKLLISGHINRPSGVPDRFSGSTSGTSASLAITGLQAEDEADYYCQSYDSSLSDSVFGGGTKLTV

SEQ ID NO: 3712 - protein, 11 aa, Artificial Sequence
  Synthetic
QSYDSSLSDSV

SEQ ID NO: 3713 - protein, 120 aa, Artificial Sequence; identical to SEQ ID NO: 143
  Synthetic

SEQ ID NO: 3714 - protein, 11 aa, Artificial Sequence
  Synthetic
SRAWIPTPHDY

SEQ ID NO: 3715 - protein, 109 aa, Artificial Sequence
  Synthetic
QFVLTQPPSASGTPGQRVTISCSGGSSNIGSNPVNWYQQLPGTAPKLLIYSNNQRPSGVPDRFSGSKSGASASLAISGLQSEDEADYYCAAWDDSLKGPVFGGGTKVTV

SEQ ID NO: 3716 - protein, 11 aa, Artificial Sequence
  Synthetic
AAWDDSLKGPV

SEQ ID NO: 3717 - protein, 121 aa, Artificial Sequence
  Synthetic
QVQLVQSGAEIRKPGTSVNVSCKTSGYTFSTYYIHWVRQAPGQGLEYMGIINPSGGSTHYAQKFQGRVTMTSDTSTSTVYMELSSLRSADTAVYYCARAKVVPAATHFDFWGQGTLVTVSS

SEQ ID NO: 3718 - protein, 14 aa, Artificial Sequence
  Synthetic
ARAKVVPAATHFDF

SEQ ID NO: 3719 - protein, 107 aa, Artificial Sequence
  Synthetic
SYVLTQPPSVSVGPGQTARVPCGGNNIGSKNVHWYQQKPGQAPVLVVYDDSDRPSGIPERFSGSNSGDTATLTISRVEAGDEADYYCHVWDSSGDHVIFGGGTKLTV

SEQ ID NO: 3720 - protein, 11 aa, Artificial Sequence
  Synthetic
HVWDSSGDHVI

SEQ ID NO: 3721 - protein, 126 aa, Artificial Sequence; identical to SEQ ID NO: 175
  Synthetic

SEQ ID NO: 3722 - protein, 17 aa, Artificial Sequence
  Synthetic
TRRAHYSGSGLSSYVDY

SEQ ID NO: 3723 - protein, 109 aa, Artificial Sequence
  Synthetic
QFVLTQEPSLTVSPGGTVTLTCGSSTGTVTSGQYPYWFQQKPGQAPKTLIYDTSSKHSWTPARFSGSLLGGKAALTLSGAQPEDEAEYYCLISYSGAWVFGGGTKLTVL

SEQ ID NO: 3724 - protein, 9 aa, Artificial Sequence
  Synthetic
LISYSGAWV

SEQ ID NO: 3725 - protein, 120 aa, Artificial Sequence
  Synthetic
EVQLVQSGAEVKEPGESLKISCKASEFSFISYWIGWVRQKPGKGLEWMGIIYPGDSDTKYGPSLQGQVTISADKSINTAFLQWNSLRASDTAIYYCARLVSSYYGWFDTWGQGTRVTVSS

SEQ ID NO: 3726 - protein, 13 aa, Artificial Sequence
  Synthetic
ARLVSSYYGWFDT

SEQ ID NO: 3727 - protein, 109 aa, Artificial Sequence
  Synthetic
QFVLTQPPSASGTPGQRVTISCSGSSSNIGSNPLNWYQQLPGSAPRLLIYSNNQRPSGVPDRFSGSKSGTSASLAISGLQSEDEGDYYCATWDDSLSGVFGGGTRLTVL

SEQ ID NO: 3728 - protein, 10 aa, Artificial Sequence
  Synthetic
ATWDDSLSGV

SEQ ID NO: 3729 - protein, 118 aa, Artificial Sequence
  Synthetic
EVQLVQSGAEVKKPGDSLKISCKGSGYSFISHWIAWVRQKPGKGLEWMGIIHPGDSDTRYSPSIQGQVTISADRFITTAYLQWSSLQASDTAMYYCARRGSSWEIDHWGQGTQVIVSS

SEQ ID NO: 3730 - protein, 11 aa, Artificial Sequence
  Synthetic
ARRGSSWEIDH

SEQ ID NO: 3731 - protein, 110 aa, Artificial Sequence
  Synthetic
QFVLTQPPSASGTPGQRVTISCSGSSSNIGSYTVNWYHQVPGTAPKVLIYGNTQRPSGVPDRFSGSKSGTSASLAISGLQSEDEGDYYCAAWDDSLDGWMFGGGTTLTVL

SEQ ID NO: 3732 - protein, 11 aa, Artificial Sequence
  Synthetic
AAWDDSLDGWM

SEQ ID NO: 3733 - protein, 121 aa, Artificial Sequence; identical to SEQ ID NO: 147
  Synthetic

SEQ ID NO: 3734 - protein, 15 aa, Artificial Sequence
  Synthetic
ARHYDILTALSWFDP

SEQ ID NO: 3735 - protein, 110 aa, Artificial Sequence
  Synthetic
  misc_feature (2)..(2): Xaa can be any naturally occurring amino acid
QXVLTQPPSVSAAPGQTVTISCSGSSSNIRNNFVSWYQQFPGTAPKLLIYDNNKRPSGIPDRFSGSKSGTSATLGITGLQTGDEADYYCGTWDSSPSACWVFGAGTKLTV

SEQ ID NO: 3736 - protein, 12 aa, Artificial Sequence
  Synthetic
GTWDSSPSACWV

SEQ ID NO: 3737 - protein, 119 aa, Artificial Sequence
  Synthetic
EVQLVQSGVEVKKPGESLKISCKGSGYSFTSYWIGWVRQMPGKGLEWMGIIYPGDSDIRYSPSFQGQVTISADRSINTAYVQWSSLKASDIAIYYCVRGVAVDWYFDLWGRGTLVTVSS

SEQ ID NO: 3738 - protein, 12 aa, Artificial Sequence
  Synthetic
VRGVAVDWYFDL

SEQ ID NO: 3739 - protein, 112 aa, Artificial Sequence
  Synthetic
QFVLTQPPSVSGAPGQRVTISCTGSSSNIGAGHEVHWYQQLPGRAPKLLIYGNTNRPSGVPDRFSGSKSGTSASLAITGLQSEDEADYYCQSFDSSLNVLHVFGTGTKVTVL

SEQ ID NO: 3740 - protein, 12 aa, Artificial Sequence
  Synthetic
QSFDSSLNVLHV

SEQ ID NO: 3741 - protein, 126 aa, Artificial Sequence
  Synthetic
EVQLVESGGGFVKPGRSLRLSCTTSGFTFGDYPMGWFRQAPGKGLEWIGFIRNEAYGGAAEYAASVKGRFTISRDDSKSIAYLQMNSLKTEDTAVYYCTRRAHYSGSGLTSYVDYWGQGTLVTVSS

SEQ ID NO: 3742 - protein, 17 aa, Artificial Sequence
  Synthetic
TRRAHYSGSGLTSYVDY

SEQ ID NO: 3743 - protein, 109 aa, Artificial Sequence
  Synthetic
QFVLTQEPSLTVSPGGTVTLTCGSSTGAVTSGHYPYWFQQKPGQAPRTLIYDTTNKHSWTPARFSGSLLGGKAALTLSGAQPEDEAEYYCLVSYSGAWVFGGGTKLTVL

SEQ ID NO: 3744 - protein, 9 aa, Artificial Sequence
  Synthetic
LVSYSGAWV

SEQ ID NO: 3745 - protein, 122 aa, Artificial Sequence; identical to SEQ ID NO: 213
  Synthetic

SEQ ID NO: 3746 - protein, 15 aa, Artificial Sequence
  Synthetic
AKSDHGDYVIGAFDI

SEQ ID NO: 3747 - protein, 110 aa, Artificial Sequence
  Synthetic
QFVLTQPPSASGSPGQSVTISCTGTSGDVGGYNYVSWYQQHPGKAPKLMIYEVSKRPSGVPDRFSGSKSGNTASLTVSGLQAEDEADYYCNSYAGSNNWVFGGGTKLTVL

SEQ ID NO: 3748 - protein, 10 aa, Artificial Sequence
  Synthetic
NSYAGSNNWV

SEQ ID NO: 3749 - protein, 122 aa, Artificial Sequence; identical to SEQ ID NO: 187
  Synthetic

SEQ ID NO: 3750 - protein, 16 aa, Artificial Sequence
  Synthetic
AKEGNGYGYQYAGMDV

SEQ ID NO: 3751 - protein, 110 aa, Artificial Sequence
  Synthetic
QFVLTQPASVSGSPGQSITISCTGTNSDVGGYDYVSWYQQHPGKAPKLIIFEVINRPSGVSNRFSGSKSGNTASLTISGLRAEDEADYYCCSYTTSTTRVFGGGTKLTVL

SEQ ID NO: 3752 - protein, 10 aa, Artificial Sequence
  Synthetic
CSYTTSTTRV

SEQ ID NO: 3753 - protein, 124 aa, Artificial Sequence; identical to SEQ ID NO: 149
  Synthetic

SEQ ID NO: 3754 - protein, 17 aa, Artificial Sequence
  Synthetic
AKSPINYCANGVCYPDS

SEQ ID NO: 3755 - protein, 111 aa, Artificial Sequence
  Synthetic
NFVLTQPHSVSESPGKTVTISCTGSSGSIANNYVQWYQQRPGSAPTTVIFEDTQRPSGVPDRFSGSIDSSSNSASLNISGLKPEDEADYYCQSFDVNSRWVFGGGTKLTVL

SEQ ID NO: 3756 - protein, 10 aa, Artificial Sequence
  Synthetic
QSFDVNSRWV

SEQ ID NO: 3757 - protein, 119 aa, Artificial Sequence
  Synthetic
EVQLVQSGAELKKPGESLKISCKGSGNTFTGYWIGWVRQMPGTGLEWVGIIYPGDSGTRYSPSFQGQVTISADKSISTAYLQWSSLKASDTAMYYCVRGIPVDWYFDLWGRGTLVTVSS

SEQ ID NO: 3758 - protein, 12 aa, Artificial Sequence
  Synthetic
VRGIPVDWYFDL

SEQ ID NO: 3759 - protein, 112 aa, Artificial Sequence
  Synthetic
QFVLTQPPSVSGAPGQRVTISCTGSSSNIGAGHDVHWYQQLPGTAPKLLIYGDSNRPSGVPDRFSGSKSGTSASLAITGLQAEDEADYYCQSYDTSLSALYVFGTGTKVTVL

SEQ ID NO: 3760 - protein, 12 aa, Artificial Sequence
  Synthetic
QSYDTSLSALYV

SEQ ID NO: 3761 - protein, 127 aa, Artificial Sequence
  Synthetic
QVQLVQSGAEVKKPGSSVKVSCKASGGTFNSYSISWVRQAPGQGLEWMGRIMPILGIANPAQKFQDRVTMTADKSTSTAYMELSSLRSEDTAVYYCAREGSYVAVTGNLAAEYLQHWGQGTLVTVSS

SEQ ID NO: 3762 - protein, 20 aa, Artificial Sequence
  Synthetic
AREGSYVAVTGNLAAEYLQH

SEQ ID NO: 3763 - protein, 111 aa, Artificial Sequence
  Synthetic
  misc_feature (4)..(4): Xaa can be any naturally occurring amino acid
  misc_feature (11)..(11): Xaa can be any naturally occurring amino acid
  misc_feature (36)..(36): Xaa can be any naturally occurring amino acid
  misc_feature (65)..(65): Xaa can be any naturally occurring amino acid
  misc_feature (86)..(86): Xaa can be any naturally occurring amino acid
QFVXTQPPSVXGAPGQRVTISCTGSDSNIGAGYDVXWYQQLPGTAPKFLIYGNNNRPSGVPDRFXGSKYGTSASLAITGFQEEEEXDYYCQSYDSSLIGVILGEGTKLTVL

SEQ ID NO: 3764 - protein, 11 aa, Artificial Sequence
  Synthetic
QSYDSSLIGVI

SEQ ID NO: 3765 - protein, 127 aa, Artificial Sequence; identical to SEQ ID NO: 139
  Synthetic

SEQ ID NO: 3766 - protein, 21 aa, Artificial Sequence
  Synthetic
ARAGFGFVITSRSGTDPLFDY

SEQ ID NO: 3767 - protein, 112 aa, Artificial Sequence
  Synthetic
QFVLTQPPSVSGAPGQRVTISCTGSSSNIGAGYDVHWYQQLPGTAPKVLIYGNNNRPSGVPDRFSGSKSGTSASLAITGLQAEDEADYYCQSYDTSLSGSRVFGGGTKLTVL

SEQ ID NO: 3768 - protein, 12 aa, Artificial Sequence
  Synthetic
QSYDTSLSGSRV

SEQ ID NO: 3769 - protein, 128 aa, Artificial Sequence; identical to SEQ ID NO: 219
  Synthetic

SEQ ID NO: 3770 - protein, 22 aa, Artificial Sequence
  Synthetic
ARGQRGYYDRSGYYWGWRAFDI

SEQ ID NO: 3771 - protein, 106 aa, Artificial Sequence
  Synthetic
SYVLTQPPSVSVAPGQTARITCGGNNIGNKSVYWYQQKPGQAPVLVVYDDSGRPSGIPERFSGSNSANTATLTISRVEAGDEADYYCQVWDNNSDQFGGGTKLTVL

SEQ ID NO: 3772 - protein, 9 aa, Artificial Sequence
  Synthetic
QVWDNNSDQ

SEQ ID NO: 3773 - protein, 120 aa, Artificial Sequence
  Synthetic
EVQLVESGGGLVQPGRSLRLSCTASGFTFGDFSMSWFRQAPGKGLEWVGFIRRKADGGTTEYAASVRGRFTISRDDSKSIAFLLMDSLKSEDTAVYFCTRGWIPTPHDYWGQGMLVTVSS

SEQ ID NO: 3774 - protein, 11 aa, Artificial Sequence
  Synthetic
TRGWIPTPHDY

SEQ ID NO: 3775 - protein, 109 aa, Artificial Sequence
  Synthetic
QFVLTQPPSASGTPGQRVSISCSGSSSNIGSNPVNWYQQLPGTAPKLLIYSNNRRPSGVPDRFSGSKSGASASLAISGLQSEDEADYYCAAWDDSLKGPVFGGGTKLTV

SEQ ID NO: 3776 - protein, 11 aa, Artificial Sequence
  Synthetic
AAWDDSLKGPV

SEQ ID NO: 3777 - protein, 123 aa, Artificial Sequence
  Synthetic
QVQLVQSGAEVKKPGSSVKVSCKASGGTFSNYIIGWVRQAPGQGLEWMGRIIPILGIGNYPQKFQGRVTVTAEKSTSTVYMELSNLRSDDTAVYYCARGKGYSSSSAAYYFDYWGQGTLVTVS

SEQ ID NO: 3778 - protein, 17 aa, Artificial Sequence
  Synthetic
ARGKGYSSSSAAYYFDY

SEQ ID NO: 3779 - protein, 112 aa, Artificial Sequence
  Synthetic
QFVLTQPPSVSGAPGQRVTISCTGSNSNIGAGYDVHWYQQLPGTAPKLLIYANSNRPSGVPDRFSGSQSGTSASLAITGLQAEDEADYYCQSYDSSLSGSEVFGGGTKLTVL

SEQ ID NO: 3780 - protein, 12 aa, Artificial Sequence
  Synthetic
QSYDSSLSGSEV

SEQ ID NO: 3781 - protein, 128 aa, Artificial Sequence; identical to SEQ ID NO: 197
  Synthetic

SEQ ID NO: 3782 - protein, 21 aa, Artificial Sequence
  Synthetic
AREPIEGVIGGMIVNYYYMDV

SEQ ID NO: 3783 - protein, 111 aa, Artificial Sequence
  Synthetic
QFVLTQPASVSGSPGQSITISCTGTSSDVGGYYYVSWYQQHPGKAPKLMIYDVSSRPSGVSNRFSGSKSGNTASLTISGLQAEDEADYYCSSYTSSNTLVVFGGGTKLTVL

SEQ ID NO: 3784 - protein, 11 aa, Artificial Sequence
  Synthetic
SSYTSSNTLVV

SEQ ID NO: 3785 - protein, 118 aa, Artificial Sequence; identical to SEQ ID NO: 3729
  Synthetic

SEQ ID NO: 3786 - protein, 11 aa, Artificial Sequence
  Synthetic
ARRGSSWEIDH

SEQ ID NO: 3787 - protein, 110 aa, Artificial Sequence; identical to SEQ ID NO: 3731
  Synthetic

SEQ ID NO: 3788 - protein, 11 aa, Artificial Sequence
  Synthetic
AAWDDSLDGWM

SEQ ID NO: 3789 - protein, 110 aa, Artificial Sequence
  Synthetic
EVQLVESGGGLVKPGGSLRLSCAASGFIFSTYNMNWVRQAPGKGLEWVSSINSLSDYIYYADSVEGRFTISRDNAKKSLYLQMNSLRAEDTAVYYCVRDLGCGGDCPFDY

SEQ ID NO: 3790 - protein, 14 aa, Artificial Sequence
  Synthetic
VRDLGCGGDCPFDY

SEQ ID NO: 3791 - protein, 111 aa, Artificial Sequence
  Synthetic
  misc_feature (2)..(2): Xaa can be any naturally occurring amino acid
QXVLTQPPSVSGAPGQRVTISCTGSRSNIGAGFDVHWYQQLPGTAPKLLTQGNNNRPSGVPDRFSASKSGTSASLAITGLQTEDEADYYCQSYDSSLSGWVIGGGTKLTVL

SEQ ID NO: 3792 - protein, 11 aa, Artificial Sequence
  Synthetic
QSYDSSLSGWV

SEQ ID NO: 3793 - protein, 120 aa, Artificial Sequence
  Synthetic
EVQLVESGGGLVQPGRSLRLSCTAAGFTFADFSMSWFRQAPGKGLEWVAFIRRKADGGTTEYAASVRGRFTISRDDSKSIAYLLMNSLKSEDTAVYYCTRAWIPTPHDYWGQGMLVTVSS

SEQ ID NO: 3794 - protein, 11 aa, Artificial Sequence
  Synthetic
TRAWIPTPHDY

SEQ ID NO: 3795 - protein, 109 aa, Artificial Sequence
  Synthetic
QFVLTQPPSASGTPGQRVTISCSGSSSNIGSNPVNWYQQLPGTAPKLLMYSNNQRPSGVPDRFSASKSGASASLAISGLQSEDEADYYCAAWDDSLKGPVFGGGTKLTV

SEQ ID NO: 3796 - protein, 11 aa, Artificial Sequence
  Synthetic
AAWDDSLKGPV

SEQ ID NO: 3797 - protein, 119 aa, Artificial Sequence; identical to SEQ ID NO: 201
  Synthetic

SEQ ID NO: 3798 - protein, 12 aa, Artificial Sequence
  Synthetic
VRGLPVDWYFDL

SEQ ID NO: 3799 - protein, 111 aa, Artificial Sequence
  Synthetic
QFVLTQPPSVSGAPEQRVTISCTGSSSNIGAGHDVHWYQQLPGTAPKLLIYNNNNRPSGVPDRFSGSKSGASASLAISGLQAEDEAEYYCQSYDKSLSVLYVLGTGTKVTV

SEQ ID NO: 3800 - protein, 12 aa, Artificial Sequence
  Synthetic
QSYDKSLSVLYV

SEQ ID NO: 3801 - protein, 122 aa, Artificial Sequence
  Synthetic
QVQLVQSGAEVKKPGSSVKVSCRASGGTFSSHSIGWVRQAPGQGLEWMGRVIPTLGVADYAQKFQGRVMISADKSTSTAYMELSSLRPEDTALYFCARESFYCTSTTCYDVWGHGTLVTVSS

SEQ ID NO: 3802 - protein, 15 aa, Artificial Sequence
  Synthetic
ARESFYCTSTTCYDV

SEQ ID NO: 3803 - protein, 111 aa, Artificial Sequence
  Synthetic
QFVVTQPPSVSGAPGQRVTISCSGTDSNIEAGYDVHWYQQFPGTSPKLLIYDNNNRPSGVPDRFSGFKSGTSVSLAITGLQAEDEAEYYCQSYDSSLIGSVFGGGTKLTVL

SEQ ID NO: 3804 - protein, 11 aa, Artificial Sequence
  Synthetic
QSYDSSLIGSV

SEQ ID NO: 3805 - protein, 121 aa, Artificial Sequence
  Synthetic
QVQLQESGPGLVKPSETLSLTCTVSGGSISRYFWAWIRQPPGKGLEWIGYIYYSGTATYNPSLKSRVTISVDTSRTHFSLKLRSVTAADTAVYYCARLLSTEWLFNWFDPWGQGTLVTVSS

SEQ ID NO: 3806 - protein, 15 aa, Artificial Sequence
  Synthetic
ARLLSTEWLFNWFDP

SEQ ID NO: 3807 - protein, 107 aa, Artificial Sequence
  Synthetic
SYVLTQPPSVSVSPGQTASITCSGDKLGEKYSCWYQQKPGQSPVLVIYQDTKRPSGIPERFSGSKSGNTATLTISGTQAMDEADYYCQAWDSNTAYVFGTGTKVTVL

SEQ ID NO: 3808 - protein, 10 aa, Artificial Sequence
  Synthetic
QAWDSNTAYV

SEQ ID NO: 3809 - protein, 124 aa, Artificial Sequence
  Synthetic
QVQLVQSGAEVKKPGSSVKVFCKASGGTFSSNSITWVRQAPGQGLEWMGSIIPILATANYPQKFQGRVTITADKSTDTAYMELSSLRSEDTAVYYCARETGYSGYLAVAYMDVWGKGTTVTVSS

SEQ ID NO: 3810 - protein, 17 aa, Artificial Sequence
  Synthetic
ARETGYSGYLAVAYMDV

SEQ ID NO: 3811 - protein, 111 aa, Artificial Sequence
  Synthetic
QFVLTQPPSVSGAPGQRVTVSCTGTSSNIGAGYDVHWYQQLPGTAPKLLIYGNNNRPSGVPDRFSGSKSGTSAALAITGLQAEDEADYYCQSYDSSLSGSLFGGGTKLSVL

SEQ ID NO: 3812 - protein, 11 aa, Artificial Sequence
  Synthetic
QSYDSSLSGSL

SEQ ID NO: 3813 - protein, 122 aa, Artificial Sequence; identical to SEQ ID NO: 3801
  Synthetic

SEQ ID NO: 3814 - protein, 15 aa, Artificial Sequence
  Synthetic
ARESFYCTSTTCYDV

SEQ ID NO: 3815 - protein, 111 aa, Artificial Sequence
  Synthetic
QFVLTQPPSVSGAPGQRVTISCSGTDSNIEAGYDVHWYQQFPGTSPKLLIYDNNNRPSGVPDRFSGFKSGTSVSLAITGLQAEDEAEYYCQSYDSSLIGSVFGGGTKLTVL

SEQ ID NO: 3816 - protein, 11 aa, Artificial Sequence
  Synthetic
QSYDSSLIGSV

SEQ ID NO: 3817 - protein, 127 aa, Artificial Sequence; identical to SEQ ID NO: 139
  Synthetic

SEQ ID NO: 3818 - protein, 21 aa, Artificial Sequence
  Synthetic
ARAGFGFVITSRSGTDPLFDY

SEQ ID NO: 3819 - protein, 112 aa, Artificial Sequence; identical to SEQ ID NO: 3767
  Synthetic

SEQ ID NO: 3820 - protein, 12 aa, Artificial Sequence
  Synthetic
QSYDTSLSGSRV

SEQ ID NO: 3821 - protein, 121 aa, Artificial Sequence
  Synthetic
QVQLQESGPGLVKPSETLSLTCTVSGDSINKYYWGWIRQPPGKGLEWIGYIYYSGTTNYNPSLKSRVTISVDRSQTQFSLRLSSVTAADTAVYYCARLLSTEWSFNWFDPWGQGTLVTVSS

SEQ ID NO: 3822 - protein, 15 aa, Artificial Sequence
  Synthetic
ARLLSTEWSFNWFDP

SEQ ID NO: 3823 - protein, 107 aa, Artificial Sequence
  Synthetic
SYVLTQPPSVSVSPGQTATITCSGDTVGDKFACWYQQKPGQSPLLVIYQNNKRPSWIPERFSGSKSGNTATLTISGTQAMDEADYYCQAWDSNSAYVFGTGTKLTVL

SEQ ID NO: 3824 - protein, 10 aa, Artificial Sequence
  Synthetic
QAWDSNSAYV

SEQ ID NO: 3825 - protein, 123 aa, Artificial Sequence
  Synthetic
QVQLVESGGGVVQPGRSLRLSCAASGFTFSNYGMHWVRQAPGKGLEWVAVISYDGSDRDYIDSVKGRFTISRDNSKNTLYLQMNRLRTDDTAVYFCAKTMATHYYYYYGMDVWGQGTTVTVSS

SEQ ID NO: 3826 - protein, 16 aa, Artificial Sequence
  Synthetic
AKTMATHYYYYYGMDV

SEQ ID NO: 3827 - protein, 111 aa, Artificial Sequence
  Synthetic
QFVLTQPPSASGSPGQSVTISCTGTSSDVGGYNYVSWYQQHPGKAPKLMIYEVSERPSGVPDRFSGSKSGNTASLTVSGLHTEDEADYYCSSYAGSNYRWVFGGGTKLTVL

SEQ ID NO: 3828 - protein, 11 aa, Artificial Sequence
  Synthetic
SSYAGSNYRWV

SEQ ID NO: 3829 - protein, 119 aa, Artificial Sequence
  Synthetic
EVQLVQSGAEVKKPGESLKISCKGSGSTFRNYWIGWVRQMPGKGLEWMGIVYPDDSDTRYNPSFEGQVTISADKSINTAYLQWSSLQASDTALYYCTRGVPVDWYFDFWGRGTLVTVSS

SEQ ID NO: 3830 - protein, 12 aa, Artificial Sequence
  Synthetic
TRGVPVDWYFDF

SEQ ID NO: 3831 - protein, 112 aa, Artificial Sequence
  Synthetic
QFVLTQPPSVSGAPGQRVTISCTGSSSNIGAGYDVHWYQQLPGTAPKLLIYGDNNRPSGVPDRFSGSKSGASASLAITGLQAEDEGDYYCQSFGTSLSALYVFGSGTKVTVL

SEQ ID NO: 3832 - protein, 12 aa, Artificial Sequence
  Synthetic
QSFGTSLSALYV

SEQ ID NO: 3833 - protein, 123 aa, Artificial Sequence
  Synthetic
QVQLVQSGAEVKKPGSSVKVSCKASGGTFSNYIIGWVRQAPGQGLEWMGRIIPILGIGNYPEKFQGRVAITADKSTSTVYMELSSLRSDDTAVYYCARGKGYSSSSAAYYFDSWGQGTPVTVS

SEQ ID NO: 3834 - protein, 17 aa, Artificial Sequence
  Synthetic
ARGKGYSSSSAAYYFDS

SEQ ID NO: 3835 - protein, 112 aa, Artificial Sequence
  Synthetic
QFVLTQPPSVSGAPGQRVTISCTGSNSNIGAAYDVHWYQQLPGTAPKLLIYANSNRPSGVPDRFSGSQSGTSASLAISGLQAEDEADYYCQSYDSSLGGSEVFGGGTKLTVL

SEQ ID NO: 3836 - protein, 12 aa, Artificial Sequence
  Synthetic
QSYDSSLGGSEV

SEQ ID NO: 3837 - protein, 118 aa, Artificial Sequence; identical to SEQ ID NO: 3729
  Synthetic

SEQ ID NO: 3838 - protein, 11 aa, Artificial Sequence
  Synthetic
ARRGSSWEIDH

SEQ ID NO: 3839 - protein, 110 aa, Artificial Sequence; identical to SEQ ID NO: 3731
  Synthetic

SEQ ID NO: 3840 - protein, 11 aa, Artificial Sequence
  Synthetic
AAWDDSLDGWM

SEQ ID NO: 3841 - protein, 122 aa, Artificial Sequence; identical to SEQ ID NO: 211
  Synthetic

SEQ ID NO: 3842 - protein, 14 aa, Artificial Sequence
  Synthetic
ARGDTFGRGYYFDF

SEQ ID NO: 3843 - protein, 109 aa, Artificial Sequence
  Synthetic
SYVLTQPPSVSVAPGQTARITCGGNNIGTNSMHWYQQKPGQAPVLVVFDDSDRPSGIPERFSGSNSGNTATLTISRVEAGDEADYHCQVWDRSSDRPWVFGGGTKLTVL

SEQ ID NO: 3844 - protein, 12 aa, Artificial Sequence
  Synthetic
QVWDRSSDRPWV

SEQ ID NO: 3845 - protein, 124 aa, Artificial Sequence
  Synthetic
QVQLVQSGAEVKKPGSSVKVSCKASGGNFNSYTITWVRQAPGHGLEWMGRIIPTLGVANYALNFQDRITITADKSTSTAYMDLSSLRSEDTAVYYCARETGYSGFLAVAYMDVWGNGTTVTVSS

SEQ ID NO: 3846 - protein, 17 aa, Artificial Sequence
  Synthetic
ARETGYSGFLAVAYMDV

SEQ ID NO: 3847 - protein, 110 aa, Artificial Sequence
  Synthetic
QFVLTQPPSVSGAPGQRVTISCTGSSSNVGAGYDVHWYQQLPGTAPKLLIYRNNNRPSGVPDRFSGSKSGSSASLDITGLQAEDEADYYCQSYDSSLSDSVFGGGTKLTV

SEQ ID NO: 3848 - protein, 11 aa, Artificial Sequence
  Synthetic
QSYDSSLSDSV

SEQ ID NO: 3849 - protein, 127 aa, Artificial Sequence; identical to SEQ ID NO: 139
  Synthetic

SEQ ID NO: 3850 - protein, 21 aa, Artificial Sequence
  Synthetic
ARAGFGFVITSRSGTDPLFDY

SEQ ID NO: 3851 - protein, 112 aa, Artificial Sequence; identical to SEQ ID NO: 3767
  Synthetic

SEQ ID NO: 3852 - protein, 12 aa, Artificial Sequence
  Synthetic
QSYDTSLSGSRV

SEQ ID NO: 3853 - protein, 118 aa, Artificial Sequence
  Synthetic
EVQLVESGGGLIQPGGSLRLSCAASGFSVSSNDMTWVRQAPGKGLEWVSVIYSGGGTYHVDSAKGRFTISRHNSKNTLSLQMNDLRAEDTAVYYCARLTMTTYYFDSWGQGTLVTVSS

SEQ ID NO: 3854 - protein, 12 aa, Artificial Sequence
  Synthetic
ARLTMTTYYFDS

SEQ ID NO: 3855 - protein, 110 aa, Artificial Sequence
  Synthetic
SYVLTQPPSVSLAPGQTARITCGGNGIGSKSVHWYQQKPGRAPVLVVYDDSVRPSGTPARFSGSNSGNTATLTISRVEAGDEADYYCQVWDSFRDHQDWVFGGGTKLTVL

SEQ ID NO: 3856 - protein, 13 aa, Artificial Sequence
  Synthetic
QVWDSFRDHQDWV

SEQ ID NO: 3857 - protein, 122 aa, Artificial Sequence
  Synthetic
QVQLQESGPGLVKPSQTLSLTCTVSGGSITSGGYYWSWIRQHPGKGLELIGYIYNSGSTYYNPSLKSRVTISLDTSENQFSLKLSSVTAADTAVYFCARGDTFGRGYYFDYWGQGTLVTVSS

SEQ ID NO: 3858 - protein, 14 aa, Artificial Sequence
  Synthetic
ARGDTFGRGYYFDY

SEQ ID NO: 3859 - protein, 109 aa, Artificial Sequence
  Synthetic
SYVLTQPPSVSVAPGQTARITCGGNNFGSKTVHWYQQKPGQAPVMVVFDDSDRPSGIPERFSGSNSGNTATLTISRVEAGDEADYSCQVWDRTIDHPWVFGGGTKLTVL

SEQ ID NO: 3860 - protein, 12 aa, Artificial Sequence
  Synthetic
QVWDRTIDHPWV

SEQ ID NO: 3861 - protein, 124 aa, Artificial Sequence
  Synthetic
QVQLVQSGTEVKKPGSSVKVSCKASGGTFSSYTINWVRQAPGQGLEWMGRIIPLLGTANYAQKFQGRVTMTADKSTSTGYMELSNLRSDDTAVYYCARGVGYSSSGSNWYFDLWGRGTLVTVSS

SEQ ID NO: 3862 - protein, 17 aa, Artificial Sequence
  Synthetic
ARGVGYSSSGSNWYFDL

SEQ ID NO: 3863 - protein, 111 aa, Artificial Sequence
  Synthetic
QFVLTQPPSVSGAPGQRVTISCTGSSSNIGAGYDVHWYQQLPGTAPKLLISADSDRPSGVPDRFSGSKSGTSASLAITGLQAEDEADYYCQSYDSSLSGSVFGGGTKVTVL

SEQ ID NO: 3864 - protein, 11 aa, Artificial Sequence
  Synthetic
QSYDSSLSGSV

SEQ ID NO: 3865 - protein, 128 aa, Artificial Sequence
  Synthetic
QVQLVQSGAEVKKPGSSMKVSCKASGGTFSSYSISWVRQAPGQGPEWMGRVIPILGIPNYAQKFEGRVTITADKSTSTAYLELSSLRSEDTAVYYCARERGDYDYGSGSGKNWYFDLWGRGTLVTVSS

SEQ ID NO: 3866 - protein, 21 aa, Artificial Sequence
  Synthetic
ARERGDYDYGSGSGKNWYFDL

SEQ ID NO: 3867 - protein, 111 aa, Artificial Sequence
  Synthetic
QSVLTQPPSVSGAPGQRVTISCTGSNSNIGAGYDVHWYQQLPGTAPKLLIYGNINRPSGVPDRFSGSKSDTSASLAITGLQAEDEADYYCQSYDSSLIASVFGGGTKLTVL

SEQ ID NO: 3868 - protein, 11 aa, Artificial Sequence
  Synthetic
QSYDSSLIASV

SEQ ID NO: 3869 - protein, 128 aa, Artificial Sequence
  Synthetic
EVQLVESGGGLVQPGGSLRLSCAASGFIFSSFDMHWVRQATGKGLEWVSSIGTGGDTYYPGSVKGRFTISREKAKSSLYLQMNSLRAGDTAVYYCARGQRAYYNRTGHYWGWRALDIWGQGTTVTVSS

SEQ ID NO: 3870 - protein, 22 aa, Artificial Sequence
  Synthetic
ARGQRAYYNRTGHYWGWRALDI

SEQ ID NO: 3871 - protein, 106 aa, Artificial Sequence
  Synthetic
SYVLTQPPSVSVAPGQTARITCGGNNIGSKSVYWYQQKPGQAPVLVVYDDNDRPSGIPERFSGSNSGNTATLTISRVEAGDEADYYCQVWDSSSDQFGGGTKVTVL

SEQ ID NO: 3872 - protein, 9 aa, Artificial Sequence
  Synthetic
QVWDSSSDQ

SEQ ID NO: 3873 - protein, 121 aa, Artificial Sequence; identical to SEQ ID NO: 203
  Synthetic

SEQ ID NO: 3874 - protein, 15 aa, Artificial Sequence
  Synthetic
ARMLSTEWSFNWFDP

SEQ ID NO: 3875 - protein, 107 aa, Artificial Sequence
  Synthetic
SYVLTQPPSVSVSPGQAASITCSGDKLGDKFACWYQQKPGQSPVLVIYQNDKRPTGIPERFSGSNSGNTATLTISGTQAMDEADYFCQAWDSTSASVFGTGTKVTVL

SEQ ID NO: 3876 - protein, 10 aa, Artificial Sequence
  Synthetic
QAWDSTSASV

SEQ ID NO: 3877 - protein, 120 aa, Artificial Sequence; identical to SEQ ID NO: 143
  Synthetic

SEQ ID NO: 3878 - protein, 11 aa, Artificial Sequence
  Synthetic
SRAWIPTPHDY

SEQ ID NO: 3879 - protein, 109 aa, Artificial Sequence; identical to SEQ ID NO: 3715
  Synthetic

SEQ ID NO: 3880 - protein, 11 aa, Artificial Sequence
  Synthetic
AAWDDSLKGPV

SEQ ID NO: 3881 - protein, 119 aa, Artificial Sequence
  Synthetic
EVQLVQSGAEVKKPGESLNISCKASGYSFTIYWIGWVRQMSGKGLEWMGIIFPGDSDTRYSPSFQGQVTISADKSISTAYLQWRSLKASDSAVYYCARGVAVDWHFDLWGRGTLVTVSS

SEQ ID NO: 3882 - protein, 12 aa, Artificial Sequence
  Synthetic
ARGVAVDWHFDL

SEQ ID NO: 3883 - protein, 112 aa, Artificial Sequence
  Synthetic
QFVLTQPPSVSGAPGQRVTISCAGSSSNIGAGFDVYWYQQLPGTAPKLLIYGNNNRPSGVPDRFFGSKSGTSASLAITGLQAEDEADYYCQSSGSVLSDLYVFGTGTKVTVL

SEQ ID NO: 3884 - protein, 12 aa, Artificial Sequence
  Synthetic
QSSGSVLSDLYV

SEQ ID NO: 3885 - protein, 119 aa, Artificial Sequence
  Synthetic
EVQLVQSGAEVKKPGESLKISCKGSGYSFTSYWIGWVRQMPGKGLEWMGIFYPGDSDTRYSPSFQGQVTISADKSITTAYLQWSSLKASDTAMYYCARGVAVDWYFDLWGRGTLVTVSS

SEQ ID NO: 3886 - protein, 12 aa, Artificial Sequence
  Synthetic
ARGVAVDWYFDL

SEQ ID NO: 3887 - protein, 112 aa, Artificial Sequence
  Synthetic
QFVLTQPPSVSGAPGQRVTISCTGSSSNIGAGYDVHWYQQLPGTAPKLLIYGDSNRPSGVPDRFSGSKSGTSASLAITGLQAEDEADYYCQSYGSSLSALYVFGTGTKVTVL

SEQ ID NO: 3888 - protein, 12 aa, Artificial Sequence
  Synthetic
QSYGSSLSALYV

SEQ ID NO: 3889 - protein, 116 aa, Artificial Sequence; identical to SEQ ID NO: 207
  Synthetic

SEQ ID NO: 3890 - protein, 11 aa, Artificial Sequence
  Synthetic
ANQGYYYYMDV

SEQ ID NO: 3891 - protein, 111 aa, Artificial Sequence
  Synthetic
QFVLTQPASVSGSPGQSITISCTGTSSDVGAYNYVSWHQHHPGKAPKLIIYDVSNRPSGVSNRFSGSKSGNTASLTISGLQAEDEADYYCTSYTNTTTPWVFGGGTKLTVL

SEQ ID NO: 3892 - protein, 11 aa, Artificial Sequence
  Synthetic
TSYTNTTTPWV

SEQ ID NO: 3893 - protein, 126 aa, Artificial Sequence
  Synthetic
QVQLVESGGGVVQPGRSLRLSCAVSGFTFSNYGMHWVRQAPGKGLEWVAVISYDGTKKYHADSVKGRFAISRDNSESMLYLQMNSLRPDDTAVYYCAKDLFRVVVPVAAAFYFDSWGQGTLVTVSS

SEQ ID NO: 3894 - protein, 19 aa, Artificial Sequence
  Synthetic
AKDLFRVVVPVAAAFYFDS

SEQ ID NO: 3895 - protein, 108 aa, Artificial Sequence
  Synthetic
QFVLTQPASVSGSPGQSITISCTGTSSDIGAYNFVSWYQQHPGKAPRLMIYDLTNRPSGVSNRFSASKSGNTASLTISGLRAEDEADYYCTSYTNSSNIFGGGTKLTV

SEQ ID NO: 3896 - protein, 9 aa, Artificial Sequence
  Synthetic
TSYTNSSNI

SEQ ID NO: 3897 - protein, 119 aa, Artificial Sequence
  Synthetic
EVQLVQSGVEVKKPGESLKISCKGSGYSFTSYWIGWVRQMPGKGLEWMGIIYPGDSDTRYSPSFQGQVTVSADKSINTAYLHWNSLKASDTAIYYCARGVAVDWNFDLWGRGTLLTVSS

SEQ ID NO: 3898 - protein, 12 aa, Artificial Sequence
  Synthetic
ARGVAVDWNFDL

SEQ ID NO: 3899 - protein, 112 aa, Artificial Sequence
  Synthetic
QFVLTQPPSVSGAPGQRVTISCTGSSSNIGAGHDVHWYQQLPGTAPKLLIFNDNNRPSGVTDRFSGSKSGTSASLAITGLQAEDEADYYCQSYDTSLNTLYVFGTGTKVTVL

SEQ ID NO: 3900 - protein, 12 aa, Artificial Sequence
  Synthetic
QSYDTSLNTLYV

SEQ ID NO: 3901 - protein, 124 aa, Artificial Sequence
  Synthetic
QVQLVQSGAEVKKPGSSVKVSCKASGGTSSTSPIGWVRQAPGQGLEWMGRIIPLLGVANYAQMFQGRVTITADKSTSTVYMELRSLRSADTAMYYCARVKGYSSPSAAYYFDYWGQGTLVTVSA

SEQ ID NO: 3902 - protein, 17 aa, Artificial Sequence
  Synthetic
ARVKGYSSPSAAYYFDY

SEQ ID NO: 3903 - protein, 112 aa, Artificial Sequence
  Synthetic
QFVLTQPPSMSGAPGQRVTISCTGSNSNIGAGYDVHWYQQLPKTAPKLLIYATTNRPSGVPDRFSGSKSGTSASLAITGLQAEDEADYYCQSYDSSLGGSEVFGGGTKLTVL

SEQ ID NO: 3904 - protein, 12 aa, Artificial Sequence
  Synthetic
QSYDSSLGGSEV

SEQ ID NO: 3905 - protein, 128 aa, Artificial Sequence
  Synthetic
QVQLVQSGAEVKKPGASVKLSCKASGYTFETYYVNWVRQAPGQGLEWMGIFNPGGDSTSYAQKFQGRVTMTSDTSTSTVYMEVSSLRSEDTAVYYCARDATYCSSTRCYTSTGYFDYWGQGTLVTVSS

SEQ ID NO: 3906 - protein, 21 aa, Artificial Sequence
  Synthetic
ARDATYCSSTRCYTSTGYFDY

SEQ ID NO: 3907 - protein, 109 aa, Artificial Sequence
  Synthetic
SYVLTQPPSVSVAPGQTARITCGGSDVGSKSVHWYQQKPGQAPVLVVYDDSDRPSGIPERFSGSNSGNTATLTISRVEAGDEADYFCQVWDSSSGHHYVFGTGTKVTVL

SEQ ID NO: 3908 - protein, 12 aa, Artificial Sequence
  Synthetic
QVWDSSSGHHYV

SEQ ID NO: 3909 - protein, 123 aa, Artificial Sequence
  Synthetic
QVQLVESGGGVVQPGRSLRLSCAASGFTFSNYGMHWVRQAPGKGLEWVALISYDGSDKSYADSVKGRFTISRDNSKNTVYLQMNSLRAEDTAVYYCAKVDSTYYYYYYGMDVWGQGTTVTVSS

SEQ ID NO: 3910 - protein, 16 aa, Artificial Sequence
  Synthetic
AKVDSTYYYYYYGMDV

SEQ ID NO: 3911 - protein, 110 aa, Artificial Sequence
  Synthetic
QFVLTQPASVSGSPGQSITISCTGTTSDVGYYKYVSWYQQHPGRAPKLMIYEVTNRPSGVSNRFSGSKSGNTASLTISGLQAEDEADYYCSSYTSSSSWVFGGGTKVTVL

SEQ ID NO: 3912 - protein, 10 aa, Artificial Sequence
  Synthetic
SSYTSSSSWV

SEQ ID NO: 3913 - protein, 118 aa, Artificial Sequence; identical to SEQ ID NO: 3693
  Synthetic

SEQ ID NO: 3914 - protein, 11 aa, Artificial Sequence
  Synthetic
VRRGSSWEIDY

SEQ ID NO: 3915 - protein, 110 aa, Artificial Sequence; identical to SEQ ID NO: 3695
  Synthetic

SEQ ID NO: 3916 - protein, 11 aa, Artificial Sequence
  Synthetic
AAWDDSLDGWV

SEQ ID NO: 3917 - protein, 122 aa, Artificial Sequence; identical to SEQ ID NO: 213
  Synthetic

SEQ ID NO: 3918 - protein, 15 aa, Artificial Sequence
  Synthetic
AKSDHGDYVIGAFDI

SEQ ID NO: 3919 - protein, 110 aa, Artificial Sequence; identical to SEQ ID NO: 3747
  Synthetic

SEQ ID NO: 3920 - protein, 10 aa, Artificial Sequence
  Synthetic
NSYAGSNNWV

SEQ ID NO: 3921 - protein, 126 aa, Artificial Sequence
  Synthetic
QVQLVESGGRLVKPGGSLRLSCVASGFTLSDYYMSWIRQAPGRGLEWLSYSSDGDETIYYADSVKGRFTISTDNAKNSLYLQMNSLTAEDTAVYFCARDRGTTSSYYSYYYGMDVWGQGTSVTVSS

SEQ ID NO: 3922 - protein, 19 aa, Artificial Sequence
  Synthetic
ARDRGTTSSYYSYYYGMDV

SEQ ID NO: 3923 - protein, 108 aa, Artificial Sequence
  Synthetic
EIVLTQSPGTLSLSPGERATLSCRASQSVDSSDLAWYQQKPGQAPRLLIYGASSRATGVPDRFSGSGSGTDFTLTISRLEPEDFVVYYCQQYGSSPGTFGGGTRVEIK

SEQ ID NO: 3924 - protein, 9 aa, Artificial Sequence
  Synthetic
QQYGSSPGT

SEQ ID NO: 3925 - protein, 120 aa, Artificial Sequence
  Synthetic
QVQLVESGGGVVQPGGSLRLSCVASGFEFRDYGMHWVRQAPGKGLHWVAIVQSDGKNIYYADSVKGRFTISRDNSKRSQYLQMNSLRPEDTAVYYCAKENYRGTGYLESWGQGTLVTVSS

SEQ ID NO: 3926 - protein, 13 aa, Artificial Sequence
  Synthetic
AKENYRGTGYLES

SEQ ID NO: 3927 - protein, 107 aa, Artificial Sequence
  Synthetic
DIQMTQSPSTLAASVGDTVTITCRASYDVKKWVAWYQQKPGKVPKLLIYKASTLEVGVPLRFSGSGSGTEFTLTINGLQPDDFATYYCQHFHSYPYSFGQGTKLDIK

SEQ ID NO: 3928 - protein, 9 aa, Artificial Sequence
  Synthetic
QHFHSYPYS

SEQ ID NO: 3929 - protein, 125 aa, Artificial Sequence
  Synthetic
QVQLQQWGAGLLKPSETLSLTCAVFGGSFSGYYWGWIRQPPGKGLEWIAEINHSENSHYNPSLKSRVTISVDTFKNQFSLNLSSVTAADTALYYCVRRPRRYCSGDTCRGAFDIWGQGTMVTVSS

SEQ ID NO: 3930 - protein, 19 aa, Artificial Sequence
  Synthetic
VRRPRRYCSGDTCRGAFDI

SEQ ID NO: 3931 - protein, 107 aa, Artificial Sequence
  Synthetic
DIQMTQSPSSLSASVGDRVTITCRASQDISNFLAWYQQKPGKVPSLLIYAASILQPGVPSRFSGSGSGTDFTLTITSLQPEDVATYYCQKYKIDPFTFGPGTKVDIK

SEQ ID NO: 3932 - protein, 9 aa, Artificial Sequence
  Synthetic
QKYKIDPFT

SEQ ID NO: 3933 - protein, 124 aa, Artificial Sequence; identical to SEQ ID NO: 163
  Synthetic

SEQ ID NO: 3934 - protein, 17 aa, Artificial Sequence
  Synthetic
AREGVALAGNGVDGFDI

SEQ ID NO: 3935 - protein, 107 aa, Artificial Sequence; identical to SEQ ID NO: 164
  Synthetic

SEQ ID NO: 3936 - protein, 9 aa, Artificial Sequence
  Synthetic
QQTYSTPYT

SEQ ID NO: 3937 - protein, 128 aa, Artificial Sequence
  Synthetic
QVQLQQSGPGLVKPSQTLSLTCAISGDSVSSSGAAWNWIRQSPSRGLEWLGRTYYKSKWYNDYAVSVKSRITINPDTSKNQFSLQLNSVTPEDTAVYYCARMWVVAGTTDDYYYHYGMDVWGQGTTVT

SEQ ID NO: 3938 - protein, 21 aa, Artificial Sequence
  Synthetic
ARMWVVAGTTDDYYYHYGMDV

SEQ ID NO: 3939 - protein, 107 aa, Artificial Sequence
  Synthetic
DIQMTQSPSSLSASVGDRVTITCQASQDISNYLNWYQQKPGKAPKLLIYDASNLETGVPSRFSGSGSGTDFTFTISSLQPEDIATYYCQQYDNLPYTFGQGTKLEIK

SEQ ID NO: 3940 - protein, 9 aa, Artificial Sequence
  Synthetic
QQYDNLPYT

SEQ ID NO: 3941 - protein, 116 aa, Artificial Sequence
  Synthetic
EVQLVESGGGLIQPGGSLRLSCAASEFIVSRNYMSWVRQAPGKGLEWVSVIYSGGSTFYADSVKGRFTISRDESKNTLYLQMNSLRAEDTAIYYCARDRGGGILDYWGQGTLVTVS

SEQ ID NO: 3942 - protein, 11 aa, Artificial Sequence
  Synthetic
ARDRGGGILDY

SEQ ID NO: 3943 - protein, 108 aa, Artificial Sequence
  Synthetic
DIQMTQSPSSLSASVGDRVTITCQASQDINIFLNWYQQKPGKAPKLLIYDASSLETGVPSRFSGSGSGTDFTFTISSLQPEDFATYYCQQYGNLPKYTFGQGTNLEIK

SEQ ID NO: 3944 - protein, 10 aa, Artificial Sequence
  Synthetic
QQYGNLPKYT

SEQ ID NO: 3945 - protein, 131 aa, Artificial Sequence
  Synthetic
QVQLQQSGPGLLKPSQTLSLTCAISGDSVSSSGAAWNWIRQSPSRGLEWLGRTYYKSKWYNDYAVSVKSRITINPDTSKNQFSLQLNSVTPEDTAVYYCARMWVVAGTTDDYYYHYGMDVWGQGTTVTVSS

SEQ ID NO: 3946 - protein, 21 aa, Artificial Sequence
  Synthetic
ARMWVVAGTTDDYYYHYGMDV

SEQ ID NO: 3947 - protein, 107 aa, Artificial Sequence
  Synthetic
DIQMTQSPSSVSASVGDRVTITCRASQGISNWLAWYQQKPGKAPKVLLYAASSLRSGVPSRFSGSGSGTDFTLTISSLQPEDFATYYCQQTNTLPLSFGGGTKVEIK

SEQ ID NO: 3948 - protein, 9 aa, Artificial Sequence
  Synthetic
QQTNTLPLS

SEQ ID NO: 3949 - protein, 124 aa, Artificial Sequence
  Synthetic
EVQLVESGGGLVQPGGSLRLSCAASGFSFSSYSMNWVRQAPGKGLEWVSYIGGSGSIIYYADSVKGRFTLSRDNAKNSLSLHMHSLRAEDTAVYYCARGSGAARSYYYYGLDVWGQGTTVTVSS

SEQ ID NO: 3950 - protein, 17 aa, Artificial Sequence
  Synthetic
ARGSGAARSYYYYGLDV

SEQ ID NO: 3951 - protein, 107 aa, Artificial Sequence
  Synthetic
DIQMTQSPSSLSASVGDRVTITCRASQSINNYLNWYHQKPGKAPKLLIYATSTLQSGVPSRFSGSGSGPDFTLTISSLQPEDFATYYCQQTYSTPPTFGQGTRLEIK

SEQ ID NO: 3952 - protein, 9 aa, Artificial Sequence
  Synthetic
QQTYSTPPT

SEQ ID NO: 3953 - protein, 117 aa, Artificial Sequence; identical to SEQ ID NO: 151
  Synthetic

SEQ ID NO: 3954 - protein, 12 aa, Artificial Sequence
  Synthetic
TRLGGYRYGMDV

SEQ ID NO: 3955 - protein, 107 aa, Artificial Sequence
  Synthetic
DIQMTQSPSSLSASVGDRVTITCQASQDISKYLNWYQQKPGTAPKLLIYDASELERGVPSRFSGSGSGTDFTFTIISLQPEDIATYYCLQYDNLPYTFGQGTKLQIK

SEQ ID NO: 3956 - protein, 9 aa, Artificial Sequence
  Synthetic
LQYDNLPYT

SEQ ID NO: 3957 - protein, 125 aa, Artificial Sequence; identical to SEQ ID NO: 3929
  Synthetic

SEQ ID NO: 3958 - protein, 19 aa, Artificial Sequence
  Synthetic
VRRPRRYCSGDTCRGAFDI

SEQ ID NO: 3959 - protein, 107 aa, Artificial Sequence; identical to SEQ ID NO: 3931
  Synthetic

SEQ ID NO: 3960 - protein, 9 aa, Artificial Sequence
  Synthetic
QKYKIDPFT

SEQ ID NO: 3961 - protein, 131 aa, Artificial Sequence
  Synthetic
  misc_feature (67)..(67): Xaa can be any naturally occurring amino acid
QVQLQESGPGLVKPSGTLSLTCAVSGGSISSSNWWSWVRQPPGKGLEWIGEIYHSGSTNYNPSLKSXVSMSVDKSKNQFSLKLTSVTAADTAVYYCARDYIERVFARREQGLFHYSYMDVWGRGTTVTVSS

SEQ ID NO: 3962 - protein, 24 aa, Artificial Sequence
  Synthetic
ARDYIERVFARREQGLFHYSYMDV

SEQ ID NO: 3963 - protein, 107 aa, Artificial Sequence
  Synthetic
DIQMTQSPSSLSAFVGDRVTITCRASQSISNFLNWYQHKPGEAPKVLIFGATNLQSGVPSRFRGSGSGTDFILTISSLQPEDFAVYYCQHNYINPRTFGQGTKVQIK

SEQ ID NO: 3964 - protein, 9 aa, Artificial Sequence
  Synthetic
QHNYINPRT

SEQ ID NO: 3965 - protein, 122 aa, Artificial Sequence
  Synthetic
QVQLQESGPGLMKPSQTLSLTCSVSGDSIRSGNNHWSWIRQPAGKGLEWIGRVYMSGDTHYNPSLKSRVTISVDTSKNHFSLKLSSVTAADTAVYYCTRGLRFLDYPVLDVWGTGTTVTVSS

SEQ ID NO: 3966 - protein, 14 aa, Artificial Sequence
  Synthetic
TRGLRFLDYPVLDV

SEQ ID NO: 3967 - protein, 110 aa, Artificial Sequence
  Synthetic
EIVLTQSPGTLSLSPGERATLSCRASQSVSSSYLAWYQQKPGQAPRLLIYGASSRATGIPDRFSGSGSGTDFTLTISRLEPEDFAVYYCQQYGSSLYMYTFGQGTKLEIK

SEQ ID NO: 3968 - protein, 11 aa, Artificial Sequence
  Synthetic
QQYGSSLYMYT

SEQ ID NO: 3969 - protein, 127 aa, Artificial Sequence
  Synthetic
EVQLVESGGGLVKPGGSLRLSCAASGFTFNTYTMNWVRQAPGKGLEWVSSIGSSGSHIYYADSLRGRFTMSRDNAKNSLYLQMNSLRAEDTAVYYCARVGPPGWLQSDYDYYGMDVWGQGTTVIVSS

SEQ ID NO: 3970 - protein, 20 aa, Artificial Sequence
  Synthetic
ARVGPPGWLQSDYDYYGMDV

SEQ ID NO: 3971 - protein, 104 aa, Artificial Sequence
  Synthetic
EIVLTQSPGTLSLSPGERATLSCRASQSISSSFLAWYQQKPGQAPRLLIYGAYSRAIGIPDRFSGSGSGTDFTLTISRLEPEDFAVYYCQQFSAFGGGTKVEIK

SEQ ID NO: 3972 - protein, 5 aa, Artificial Sequence
  Synthetic
QQFSA

SEQ ID NO: 3973 - protein, 117 aa, Artificial Sequence
  Synthetic
EVQLVESGGGLIQPGGSLRLSCAASEFIVSYNYMSWVRQAPGKGLEWVSTIYSGGSTYYADSVKGRFTISRDNSKNTLHLQMIRLRVEDTAVYYCARDRGGGILDFWGQGTLVTVSS

SEQ ID NO: 3974 - protein, 11 aa, Artificial Sequence
  Synthetic
ARDRGGGILDF

SEQ ID NO: 3975 - protein, 107 aa, Artificial Sequence
  Synthetic
DIQMTQSPSSLSASVGDRVTITCQASQDINKYLNWYQQKPGKAPKLLIYDASNLEAGVPSRFSGRGSGTDFTFTISSLQPEDIATYYCQQYGNLPKYTFGQGTKLEI

SEQ ID NO: 3976 - protein, 10 aa, Artificial Sequence
  Synthetic
QQYGNLPKYT

SEQ ID NO: 3977 - protein, 117 aa, Artificial Sequence
  Synthetic
EVQLVESGGNLVQPGGSLRLSCAASGVTVSSNYMTWVRQAPGKGLEWVSVIYSGGSTFYADSVKGRFTISRDNSKNTVYLQMKSLRAEDTAVYYCARDLYYYGMDVWGQGTTVTVSS

SEQ ID NO: 3978 - protein, 11 aa, Artificial Sequence
  Synthetic
ARDLYYYGMDV

SEQ ID NO: 3979 - protein, 106 aa, Artificial Sequence
  Synthetic
DIQLTQSPSFLSASVGDRVTITCRASQGISSYLAWYQQKPGKAPKLLIYAASTLQSGVPSRFSGSGSGTEFTLTISSLQPEDFATYYCQELNSYPSFGQGTKLEIK

SEQ ID NO: 3980 - protein, 8 aa, Artificial Sequence
  Synthetic
QELNSYPS

SEQ ID NO: 3981 - protein, 123 aa, Artificial Sequence
  Synthetic
EVQLVESGGGLVQPGRSLRLSCAASGFTFDDYALHWVRQAPGKGLEWVSGISWNSASIHYADSVKGRFTISRDNAKNSLYLQMNRLRAEDTALYYCAKVRLYSTYLRGPFDIWGQGTMVTVSS

SEQ ID NO: 3982 - protein, 16 aa, Artificial Sequence
  Synthetic
AKVRLYSTYLRGPFDI

SEQ ID NO: 3983 - protein, 108 aa, Artificial Sequence
  Synthetic
DIQMTQSPSSLSASVGDRVTITCQASQDIRQNLNWYQHKPGKAPKLLIYGASTLETGVPSRFSGSGSGTDFTFTISSLQPEDIAAYYCQQYDNLSPLTFGGGTKVEIK

SEQ ID NO: 3984 - protein, 10 aa, Artificial Sequence
  Synthetic
QQYDNLSPLT

SEQ ID NO: 3985 - protein, 117 aa, Artificial Sequence; identical to SEQ ID NO: 3973
  Synthetic

SEQ ID NO: 3986 - protein, 11 aa, Artificial Sequence
  Synthetic
ARDRGGGILDF

SEQ ID NO: 3987 - protein, 107 aa, Artificial Sequence; identical to SEQ ID NO: 3947
  Synthetic

SEQ ID NO: 3988 - protein, 9 aa, Artificial Sequence
  Synthetic
QQTNTLPLS

SEQ ID NO: 3989 - protein, 124 aa, Artificial Sequence
  Synthetic
QVQLQESGPGLVKPSQTLSLTCTVSGGSISSSNYYWSWIRQPAGKGLEWIGRIFSSGSTNYNPSLKSRVTISVDTSKKQFSLKLSSVTAADTAVYYCARVDSSGWYTGDTFDIWGQGTMVTVSS

SEQ ID NO: 3990 - protein, 16 aa, Artificial Sequence
  Synthetic
ARVDSSGWYTGDTFDI

SEQ ID NO: 3991 - protein, 108 aa, Artificial Sequence
  Synthetic
DIQMTQSPSSLSASVGDRVTITCRASQSINSYLNWYQHKPGKAPKLLIYAAFSLQSGVPSRFSGGGSGTDFTLTISSLQPEDFATYYCQQSFPTPPYTFGQGTKLEIK

SEQ ID NO: 3992 - protein, 10 aa, Artificial Sequence
  Synthetic
QQSFPTPPYT

SEQ ID NO: 3993 - protein, 122 aa, Artificial Sequence
  Synthetic
QVQLQESGPGLVKPSETLSLTCNVSGVSISTDYWSWIRQPPGKGLEWIGYIYYSGNTKDYNPSLKSRVTISVDTSKNQFSLMLSSVTAADTAVYYCARHYDILTSLSWFDPWGQGTLVTVSS

SEQ ID NO: 3994 - protein, 15 aa, Artificial Sequence
  Synthetic
ARHYDILTSLSWFDP

SEQ ID NO: 3995 - protein, 108 aa, Artificial Sequence
  Synthetic
EIVLTQSPGTLSLSPGERATLSCRASQSISSSYLAWYQQKPGQAPRLLIYGASIRATGIPDRFSGRGSGTDFTLTISRLEPEDFAVYYCQQYGSSLYTFGQGTKLEIK

SEQ ID NO: 3996 - protein, 9 aa, Artificial Sequence
  Synthetic
QQYGSSLYT

SEQ ID NO: 3997 - protein, 125 aa, Artificial Sequence
  Synthetic
QVQLQQWGAGLLKPSETLSLTCAVYGGSFSGYYWSWIRQPPGKGLEWIGEINHSGSTSYSPSLKSRVTISVDTSKNQFSLKLTSVTAADTAVYYCARQRDTDMAMLFQYTGLDVWGQGTTVTVSS

SEQ ID NO: 3998 - protein, 19 aa, Artificial Sequence
  Synthetic
ARQRDTDMAMLFQYTGLDV

SEQ ID NO: 3999 - protein, 107 aa, Artificial Sequence
  Synthetic
DIQMTQSPSSLSASVGDRVTVTCRASQSITTYLNWYQQKPRKAPKLLIYAVSNLQGGVPSRFSGSGSGTFFNFTIDGLQPEDIATYYCQQTYSTPRTFGQGTKVEIE

SEQ ID NO: 4000 - protein, 9 aa, Artificial Sequence
  Synthetic
QQTYSTPRT

SEQ ID NO: 4001 - protein, 122 aa, Artificial Sequence; identical to SEQ ID NO: 2001
  Synthetic

SEQ ID NO: 4002 - protein, 15 aa, Artificial Sequence
  Synthetic
ARDLGFSRLQVFFDN

SEQ ID NO: 4003 - protein, 110 aa, Artificial Sequence; identical to SEQ ID NO: 2003
  Synthetic

SEQ ID NO: 4004 - protein, 10 aa, Artificial Sequence
  Synthetic
CSDVGRNNAL

SEQ ID NO: 4005 - protein, 123 aa, Artificial Sequence; identical to SEQ ID NO: 2005
  Synthetic

SEQ ID NO: 4006 - protein, 15 aa, Artificial Sequence
  Synthetic
ARWLSGYHPDDAFDI

SEQ ID NO: 4007 - protein, 109 aa, Artificial Sequence; identical to SEQ ID NO: 2007
  Synthetic

SEQ ID NO: 4008 - protein, 9 aa, Artificial Sequence
  Synthetic
CSYAGSYVV

SEQ ID NO: 4009 - protein, 125 aa, Artificial Sequence; identical to SEQ ID NO: 2009
  Synthetic

SEQ ID NO: 4010 - protein, 18 aa, Artificial Sequence
  Synthetic
ARRGDGNTPIYHYYYMDV

SEQ ID NO: 4011 - protein, 110 aa, Artificial Sequence; identical to SEQ ID NO: 2
  Synthetic

SEQ ID NO: 4012 - protein, 11 aa, Artificial Sequence
  Synthetic
ATWDDSPNGPV

SEQ ID NO: 4013 - protein, 127 aa, Artificial Sequence; identical to SEQ ID NO: 2013
  Synthetic

SEQ ID NO: 4014 - protein, 20 aa, Artificial Sequence
  Synthetic
ARGPGYCSGGRCHLTNWFDP

SEQ ID NO: 4015 - protein, 111 aa, Artificial Sequence; identical to SEQ ID NO: 2015
  Synthetic

SEQ ID NO: 4016 - protein, 12 aa, Artificial Sequence
  Synthetic
QSYDNSLSGSPV

SEQ ID NO: 4017 - protein, 126 aa, Artificial Sequence; identical to SEQ ID NO: 2017
  Synthetic

SEQ ID NO: 4018 - protein, 19 aa, Artificial Sequence
  Synthetic
ARGFDFSSSGFYVYWYFDL

SEQ ID NO: 4019 - protein, 109 aa, Artificial Sequence; identical to SEQ ID NO: 2019
  Synthetic

SEQ ID NO: 4020 - protein, 10 aa, Artificial Sequence
  Synthetic
CSYAGSSNVI

SEQ ID NO: 4021 - protein, 135 aa, Artificial Sequence; identical to SEQ ID NO: 2021
  Synthetic

SEQ ID NO: 4022 - protein, 28 aa, Artificial Sequence
  Synthetic
TRDLPLYYYDGRGHEVEHKDSLYYGMDV

SEQ ID NO: 4023 - protein, 109 aa, Artificial Sequence; identical to SEQ ID NO: 2023
  Synthetic

SEQ ID NO: 4024 - protein, 10 aa, Artificial Sequence
  Synthetic
SSYTNSSTRV

SEQ ID NO: 4025 - protein, 126 aa, Artificial Sequence; identical to SEQ ID NO: 2025
  Synthetic

SEQ ID NO: 4026 - protein, 19 aa, Artificial Sequence
  Synthetic
ARQQTPYCSGDCYSDAFDV

SEQ ID NO: 4027 - protein, 106 aa, Artificial Sequence; identical to SEQ ID NO: 2027
  Synthetic

SEQ ID NO: 4028 - protein, 9 aa, Artificial Sequence
  Synthetic
QVWDSNIVV

SEQ ID NO: 4029 - protein, 124 aa, Artificial Sequence; identical to SEQ ID NO: 2029
  Synthetic

SEQ ID NO: 4030 - protein, 17 aa, Artificial Sequence
  Synthetic
AREMGYSDSGANWYFDL

SEQ ID NO: 4031 - protein, 111 aa, Artificial Sequence; identical to SEQ ID NO: 2031
  Synthetic

SEQ ID NO: 4032 - protein, 11 aa, Artificial Sequence
  Synthetic
QSYDSSLSGSV

SEQ ID NO: 4033 - protein, 123 aa, Artificial Sequence; identical to SEQ ID NO: 25
  Synthetic

SEQ ID NO: 4034 - protein, 16 aa, Artificial Sequence
  Synthetic
ARTSSPHSSSTGDFDS

SEQ ID NO: 4035 - protein, 110 aa, Artificial Sequence; identical to SEQ ID NO: 2035
  Synthetic

SEQ ID NO: 4036 - protein, 13 aa, Artificial Sequence
  Synthetic
QVWDFTGDHPGWV

SEQ ID NO: 4037 - protein, 119 aa, Artificial Sequence; identical to SEQ ID NO: 2037
  Synthetic

SEQ ID NO: 4038 - protein, 12 aa, Artificial Sequence
  Synthetic
SGTSYPYGAFDI

SEQ ID NO: 4039 - protein, 110 aa, Artificial Sequence; identical to SEQ ID NO: 2039
  Synthetic

SEQ ID NO: 4040 - protein, 9 aa, Artificial Sequence
  Synthetic
QSYDSNTWV

SEQ ID NO: 4041 - protein, 127 aa, Artificial Sequence; identical to SEQ ID NO: 2041
  Synthetic

SEQ ID NO: 4042 - protein, 19 aa, Artificial Sequence
  Synthetic
ARLPRGYYSDSSPYHAFDV

SEQ ID NO: 4043 - protein, 108 aa, Artificial Sequence; identical to SEQ ID NO: 2043
  Synthetic

SEQ ID NO: 4044 - skipped

SEQ ID NO: 4045 - protein, 122 aa, Artificial Sequence; identical to SEQ ID NO: 2045
  Synthetic

SEQ ID NO: 4046 - protein, 15 aa, Artificial Sequence
  Synthetic
ARFPTAFFDATNMEV

SEQ ID NO: 4047 - protein, 110 aa, Artificial Sequence; identical to SEQ ID NO: 2047
  Synthetic

SEQ ID NO: 4048 - protein, 10 aa, Artificial Sequence
  Synthetic
NSYAGSNSVA

SEQ ID NO: 4049 - protein, 121 aa, Artificial Sequence; identical to SEQ ID NO: 31
  Synthetic

SEQ ID NO: 4050 - protein, 14 aa, Artificial Sequence
  Synthetic
ARGGQDELTGTFDV

SEQ ID NO: 4051 - protein, 105 aa, Artificial Sequence; identical to SEQ ID NO: 2051
  Synthetic

SEQ ID NO: 4052 - protein, 8 aa, Artificial Sequence
  Synthetic
QVWDGGWV

SEQ ID NO: 4053 - protein, 121 aa, Artificial Sequence; identical to SEQ ID NO: 2053
  Synthetic

SEQ ID NO: 4054 - protein, 14 aa, Artificial Sequence
  Synthetic
ARDPPHDPSDYFDY

SEQ ID NO: 4055 - protein, 105 aa, Artificial Sequence; identical to SEQ ID NO: 2055
  Synthetic

SEQ ID NO: 4056 - protein, 8 aa, Artificial Sequence
  Synthetic
QVWDSGKI

SEQ ID NO: 4057 - protein, 128 aa, Artificial Sequence; identical to SEQ ID NO: 2057
  Synthetic

SEQ ID NO: 4058 - protein, 20 aa, Artificial Sequence
  Synthetic
ARDAGFYYDSSGYYSNAFDI

SEQ ID NO: 4059 - protein, 108 aa, Artificial Sequence; identical to SEQ ID NO: 2059
  Synthetic

SEQ ID NO: 4060 - protein, 8 aa, Artificial Sequence
  Synthetic
CSFAGSRL

SEQ ID NO: 4061 - protein, 121 aa, Artificial Sequence; identical to SEQ ID NO: 23
  Synthetic

SEQ ID NO: 4062 - protein, 13 aa, Artificial Sequence
  Synthetic
ARVVRLWPRYFDS

SEQ ID NO: 4063 - protein, 110 aa, Artificial Sequence; identical to SEQ ID NO: 2063
  Synthetic

SEQ ID NO: 4064 - protein, 10 aa, Artificial Sequence
  Synthetic
STYAGSDNLE

SEQ ID NO: 4065 - protein, 121 aa, Artificial Sequence; identical to SEQ ID NO: 2065
  Synthetic

SEQ ID NO: 4066 - protein, 15 aa, Artificial Sequence
  Synthetic
AKDGLETTMGDYFDT

SEQ ID NO: 4067 - protein, 108 aa, Artificial Sequence; identical to SEQ ID NO: 2067
  Synthetic

SEQ ID NO: 4068 - protein, 11 aa, Artificial Sequence
  Synthetic
QVWDTSSDHWV

SEQ ID NO: 4069 - protein, 122 aa, Artificial Sequence; identical to SEQ ID NO: 2069
  Synthetic

SEQ ID NO: 4070 - protein, 13 aa, Artificial Sequence
  Synthetic
TTVIVELGYYFDH

SEQ ID NO: 4071 - protein, 110 aa, Artificial Sequence; identical to SEQ ID NO: 2071
  Synthetic

SEQ ID NO: 4072 - protein, 11 aa, Artificial Sequence
  Synthetic
AAWDDTLSGVA

SEQ ID NO: 4073 - protein, 121 aa, Artificial Sequence; identical to SEQ ID NO: 2073
  Synthetic

SEQ ID NO: 4074 - protein, 13 aa, Artificial Sequence
  Synthetic
ASTPYTNGGAFHI

SEQ ID NO: 4075 - protein, 110 aa, Artificial Sequence; identical to SEQ ID NO: 2075
  Synthetic

SEQ ID NO: 4076 - protein, 10 aa, Artificial Sequence
  Synthetic
SSYAGSNNWV

SEQ ID NO: 4077 - protein, 123 aa, Artificial Sequence; identical to SEQ ID NO: 2077
  Synthetic

SEQ ID NO: 4078 - protein, 15 aa, Artificial Sequence
  Synthetic
ARRLRQLWFGPWFDP

SEQ ID NO: 4079 - protein, 110 aa, Artificial Sequence; identical to SEQ ID NO: 2079
  Synthetic

SEQ ID NO: 4080 - protein, 10 aa, Artificial Sequence
  Synthetic
SSYAGSSNVM

SEQ ID NO: 4081 - protein, 124 aa, Artificial Sequence; identical to SEQ ID NO: 2081
  Synthetic

SEQ ID NO: 4082 - protein, 17 aa, Artificial Sequence
  Synthetic
ARPLLPGETGSLNRLDY

SEQ ID NO: 4083 - protein, 110 aa, Artificial Sequence; identical to SEQ ID NO: 2083
  Synthetic

SEQ ID NO: 4084 - protein, 11 aa, Artificial Sequence
  Synthetic
ATWDDSLNGPV

SEQ ID NO: 4085 - protein, 119 aa, Artificial Sequence; identical to SEQ ID NO: 2085
  Synthetic

SEQ ID NO: 4086 - protein, 12 aa, Artificial Sequence
  Synthetic
ARASYYYGWFDP

SEQ ID NO: 4087 - protein, 111 aa, Artificial Sequence; identical to SEQ ID NO: 2087
  Synthetic

SEQ ID NO: 4088 - protein, 10 aa, Artificial Sequence
  Synthetic
QSYDGTNLWV

SEQ ID NO: 4089 - protein, 127 aa, Artificial Sequence; identical to SEQ ID NO: 2089
  Synthetic

SEQ ID NO: 4090 - protein, 20 aa, Artificial Sequence
  Synthetic
AKHPVMAALGDVYYYYGMDV

SEQ ID NO: 4091 - protein, 111 aa, Artificial Sequence; identical to SEQ ID NO: 2091
  Synthetic

SEQ ID NO: 4092 - protein, 11 aa, Artificial Sequence
  Synthetic
QSYDSSLSGWV

SEQ ID NO: 4093 - protein, 125 aa, Artificial Sequence; identical to SEQ ID NO: 2093
  Synthetic

SEQ ID NO: 4094 - protein, 18 aa, Artificial Sequence
  Synthetic
AHHQGGGTGVYYSDPFDS

SEQ ID NO: 4095 - protein, 105 aa, Artificial Sequence; identical to SEQ ID NO: 2095
  Synthetic

SEQ ID NO: 4096 - protein, 8 aa, Artificial Sequence
  Synthetic
QVWDISPV

SEQ ID NO: 4097 - protein, 125 aa, Artificial Sequence; identical to SEQ ID NO: 69
  Synthetic

SEQ ID NO: 4098 - protein, 18 aa, Artificial Sequence
  Synthetic
ARRGDGNVPLFHYYYMDV

SEQ ID NO: 4099 - protein, 110 aa, Artificial Sequence; identical to SEQ ID NO: 70
  Synthetic

SEQ ID NO: 4100 - protein, 11 aa, Artificial Sequence
  Synthetic
AAWDDSANGPI

SEQ ID NO: 4101 - protein, 129 aa, Artificial Sequence; identical to SEQ ID NO: 2101
  Synthetic

SEQ ID NO: 4102 - protein, 23 aa, Artificial Sequence
  Synthetic
AIKPPIYYYDSSGSFLSYYYMDV

SEQ ID NO: 4103 - protein, 111 aa, Artificial Sequence; identical to SEQ ID NO: 2103
  Synthetic

SEQ ID NO: 4104 - protein, 12 aa, Artificial Sequence
  Synthetic
GTWDSSLSADWV

SEQ ID NO: 4105 - protein, 124 aa, Artificial Sequence; identical to SEQ ID NO: 2105
  Synthetic

SEQ ID NO: 4106 - protein, 17 aa, Artificial Sequence
  Synthetic
AKPKKRGDYYGSGSFDY

SEQ ID NO: 4107 - protein, 110 aa, Artificial Sequence; identical to SEQ ID NO: 2107
  Synthetic

SEQ ID NO: 4108 - protein, 10 aa, Artificial Sequence
  Synthetic
TSYRMTSTVV

SEQ ID NO: 4109 - protein, 122 aa, Artificial Sequence; identical to SEQ ID NO: 2109
  Synthetic

SEQ ID NO: 4110 - protein, 15 aa, Artificial Sequence
  Synthetic
ARDFDFSVVSNAFDI

SEQ ID NO: 4111 - protein, 110 aa, Artificial Sequence; identical to SEQ ID NO: 2111
  Synthetic

SEQ ID NO: 4112 - protein, 10 aa, Artificial Sequence
  Synthetic
NSYAGNNILV

SEQ ID NO: 4113 - protein, 126 aa, Artificial Sequence; identical to SEQ ID NO: 2113
  Synthetic

SEQ ID NO: 4114 - protein, 19 aa, Artificial Sequence
  Synthetic
ARVGRLAPRPYYFYYYMDV

SEQ ID NO: 4115 - protein, 110 aa, Artificial Sequence; identical to SEQ ID NO: 2115
  Synthetic

SEQ ID NO: 4116 - protein, 10 aa, Artificial Sequence
  Synthetic
SSYTSTTTLV

SEQ ID NO: 4117 - protein, 128 aa, Artificial Sequence; identical to SEQ ID NO: 2117
  Synthetic

SEQ ID NO: 4118 - protein, 21 aa, Artificial Sequence
  Synthetic
AREAHDGALTDYGDYLNWFDP

SEQ ID NO: 4119 - protein, 110 aa, Artificial Sequence; identical to SEQ ID NO: 2119
  Synthetic

SEQ ID NO: 4120 - protein, 13 aa, Artificial Sequence
  Synthetic
QVWDTTSDHFYWV

SEQ ID NO: 4121 - protein, 122 aa, Artificial Sequence; identical to SEQ ID NO: 2121
  Synthetic

SEQ ID NO: 4122 - protein, 15 aa, Artificial Sequence
  Synthetic
ARDLGWSRVQGSLDI

SEQ ID NO: 4123 - protein, 110 aa, Artificial Sequence; identical to SEQ ID NO: 2123
  Synthetic

SEQ ID NO: 4124 - protein, 10 aa, Artificial Sequence
  Synthetic
NSYAGNNNWV

SEQ ID NO: 4125 - protein, 123 aa, Artificial Sequence; identical to SEQ ID NO: 2125
  Synthetic

SEQ ID NO: 4126 - protein, 15 aa, Artificial Sequence
  Synthetic
ARRLRQLWFGPWFDP

SEQ ID NO: 4127 - protein, 110 aa, Artificial Sequence; identical to SEQ ID NO: 2127
  Synthetic

SEQ ID NO: 4128 - protein, 10 aa, Artificial Sequence
  Synthetic
SSYAGSNNVM

SEQ ID NO: 4129 - protein, 122 aa, Artificial Sequence; identical to SEQ ID NO: 45
  Synthetic

SEQ ID NO: 4130 - protein, 16 aa, Artificial Sequence
  Synthetic
ARTSSPHSSSTGDLDY

SEQ ID NO: 4131 - protein, 110 aa, Artificial Sequence; identical to SEQ ID NO: 2131
  Synthetic

SEQ ID NO: 4132 - protein, 13 aa, Artificial Sequence
  Synthetic
QVWDGTGDHPGWV

SEQ ID NO: 4133 - protein, 122 aa, Artificial Sequence; identical to SEQ ID NO: 2133
  Synthetic

SEQ ID NO: 4134 - protein, 17 aa, Artificial Sequence
  Synthetic
ARGADMLNVAVGADFDY

SEQ ID NO: 4135 - protein, 110 aa, Artificial Sequence; identical to SEQ ID NO: 2135
  Synthetic

SEQ ID NO: 4136 - protein, 10 aa, Artificial Sequence
  Synthetic
SSYAGSNNWV

SEQ ID NO: 4137 - protein, 117 aa, Artificial Sequence; identical to SEQ ID NO: 2137
  Synthetic

SEQ ID NO: 4138 - protein, 10 aa, Artificial Sequence
  Synthetic
ARELFRTIDP

SEQ ID NO: 4139 - protein, 110 aa, Artificial Sequence; identical to SEQ ID NO: 2139
  Synthetic

SEQ ID NO: 4140 - protein, 9 aa, Artificial Sequence
  Synthetic
QSFDSSSVV

SEQ ID NO: 4141 - protein, 120 aa, Artificial Sequence; identical to SEQ ID NO: 2141
  Synthetic

SEQ ID NO: 4142 - protein, 13 aa, Artificial Sequence
  Synthetic
ARPPYYSNFLFVY

SEQ ID NO: 4143 - protein, 109 aa, Artificial Sequence; identical to SEQ ID NO: 2143
  Synthetic

SEQ ID NO: 4144 - protein, 9 aa, Artificial Sequence
  Synthetic
LLYDGDAVL

SEQ ID NO: 4145 - protein, 122 aa, Artificial Sequence; identical to SEQ ID NO: 2145
  Synthetic

SEQ ID NO: 4146 - protein, 14 aa, Artificial Sequence
  Synthetic
ARELRWSLGGGASY

SEQ ID NO: 4147 - protein, 110 aa, Artificial Sequence; identical to SEQ ID NO: 2147
  Synthetic

SEQ ID NO: 4148 - protein, 10 aa, Artificial Sequence
  Synthetic
CSYAGSTNVI

SEQ ID NO: 4149 - protein, 121 aa, Artificial Sequence; identical to SEQ ID NO: 2149
  Synthetic

SEQ ID NO: 4150 - protein, 14 aa, Artificial Sequence
  Synthetic
ASEDYYDSSGSFDN

SEQ ID NO: 4151 - protein, 110 aa, Artificial Sequence; identical to SEQ ID NO: 2151
  Synthetic

SEQ ID NO: 4152 - protein, 10 aa, Artificial Sequence
  Synthetic
CSYAGTYTWV

SEQ ID NO: 4153 - protein, 123 aa, Artificial Sequence; identical to SEQ ID NO: 2153
  Synthetic

SEQ ID NO: 4154 - protein, 16 aa, Artificial Sequence
  Synthetic
ARGTFYYDSSGYYIDY

SEQ ID NO: 4155 - protein, 111 aa, Artificial Sequence; identical to SEQ ID NO: 2155
  Synthetic

SEQ ID NO: 4156 - protein, 11 aa, Artificial Sequence
  Synthetic
NSYAGSNNPVV

SEQ ID NO: 4157 - protein, 126 aa, Artificial Sequence; identical to SEQ ID NO: 2157
  Synthetic

SEQ ID NO: 4158 - protein, 19 aa, Artificial Sequence
  Synthetic
AREGSSGSYYTGFYSYMDV

SEQ ID NO: 4159 - protein, 113 aa, Artificial Sequence; identical to SEQ ID NO: 2159
  Synthetic

SEQ ID NO: 4160 - protein, 13 aa, Artificial Sequence
  Synthetic
SSYTSNSALANWV

SEQ ID NO: 4161 - protein, 126 aa, Artificial Sequence; identical to SEQ ID NO: 2161
  Synthetic

SEQ ID NO: 4162 - protein, 19 aa, Artificial Sequence
  Synthetic
VRTRMDYYDSIGYPWAFEI

SEQ ID NO: 4163 - protein, 108 aa, Artificial Sequence; identical to SEQ ID NO: 2163
  Synthetic

SEQ ID NO: 4164 - protein, 8 aa, Artificial Sequence
  Synthetic
CSYAGTWL

SEQ ID NO: 4165 - protein, 123 aa, Artificial Sequence; identical to SEQ ID NO: 2165
  Synthetic

SEQ ID NO: 4166 - protein, 16 aa, Artificial Sequence
  Synthetic
ARGLSILAVSEDWFDP

SEQ ID NO: 4167 - protein, 107 aa, Artificial Sequence; identical to SEQ ID NO: 2167
  Synthetic

SEQ ID NO: 4168 - protein, 11 aa, Artificial Sequence
  Synthetic
QVWDNSIDHYI

SEQ ID NO: 4169 - protein, 130 aa, Artificial Sequence; identical to SEQ ID NO: 2169
  Synthetic

SEQ ID NO: 4170 - protein, 23 aa, Artificial Sequence
  Synthetic
AIKPPTYHFDNNGYHLPYDYVDV

SEQ ID NO: 4171 - protein, 111 aa, Artificial Sequence; identical to SEQ ID NO: 2171
  Synthetic

SEQ ID NO: 4172 - protein, 12 aa, Artificial Sequence
  Synthetic
GTWDNSLSTDWV

SEQ ID NO: 4173 - protein, 123 aa, Artificial Sequence; identical to SEQ ID NO: 2173
  Synthetic

SEQ ID NO: 4174 - protein, 16 aa, Artificial Sequence
  Synthetic
AREGGHTHPYYHGMDV

SEQ ID NO: 4175 - protein, 109 aa, Artificial Sequence; identical to SEQ ID NO: 2175
  Synthetic

SEQ ID NO: 4176 - protein, 10 aa, Artificial Sequence
  Synthetic
TSYAGSITYV

SEQ ID NO: 4177 - protein, 120 aa, Artificial Sequence; identical to SEQ ID NO: 2177
  Synthetic

SEQ ID NO: 4178 - protein, 13 aa, Artificial Sequence
  Synthetic
ATGGESETTWFDP

SEQ ID NO: 4179 - protein, 109 aa, Artificial Sequence; identical to SEQ ID NO: 2179
  Synthetic

SEQ ID NO: 4180 - protein, 12 aa, Artificial Sequence
  Synthetic
QLCHSASGHPWV

SEQ ID NO: 4181 - protein, 123 aa, Artificial Sequence; identical to SEQ ID NO: 2181
  Synthetic

SEQ ID NO: 4182 - protein, 16 aa, Artificial Sequence
  Synthetic
AKGGDFWSGYLIPFDS

SEQ ID NO: 4183 - protein, 108 aa, Artificial Sequence; identical to SEQ ID NO: 2183
  Synthetic

SEQ ID NO: 4184 - protein, 11 aa, Artificial Sequence
  Synthetic
LVWDGSGDPWV

SEQ ID NO: 4185 - protein, 121 aa, Artificial Sequence; identical to SEQ ID NO: 2185
  Synthetic

SEQ ID NO: 4186 - protein, 13 aa, Artificial Sequence
  Synthetic
ARVVRLWPRYFDS

SEQ ID NO: 4187 - protein, 110 aa, Artificial Sequence; identical to SEQ ID NO: 2187
  Synthetic

SEQ ID NO: 4188 - protein, 10 aa, Artificial Sequence
  Synthetic
STYAGSDNLE

SEQ ID NO: 4189 - protein, 130 aa, Artificial Sequence; identical to SEQ ID NO: 2189
  Synthetic

SEQ ID NO: 4190 - protein, 23 aa, Artificial Sequence
  Synthetic
ARGVISMVRGVPSLPQYNYGMDV

SEQ ID NO: 4191 - protein, 106 aa, Artificial Sequence; identical to SEQ ID NO: 2191
  Synthetic

SEQ ID NO: 4192 - protein, 9 aa, Artificial Sequence
  Synthetic
QAWDSSTGV

SEQ ID NO: 4193 - protein, 128 aa, Artificial Sequence; identical to SEQ ID NO: 1193
  Synthetic

SEQ ID NO: 4194 - protein, 21 aa, Artificial Sequence
  Synthetic
AKDTPGGDDILTGWGLYGMDV

SEQ ID NO: 4195 - protein, 110 aa, Artificial Sequence; identical to SEQ ID NO: 2195
  Synthetic

SEQ ID NO: 4196 - protein, 10 aa, Artificial Sequence
  Synthetic
CSYVGSSTRV

SEQ ID NO: 4197 - protein, 119 aa, Artificial Sequence; identical to SEQ ID NO: 2197
  Synthetic

SEQ ID NO: 4198 - protein, 12 aa, Artificial Sequence
  Synthetic
AGQKWLRAPFDY

SEQ ID NO: 4199 - protein, 111 aa, Artificial Sequence; identical to SEQ ID NO: 2199
  Synthetic

SEQ ID NO: 4200 - protein, 10 aa, Artificial Sequence
  Synthetic
QSYDNIYHYV

SEQ ID NO: 4201 - protein, 114 aa, Artificial Sequence; identical to SEQ ID NO: 2201
  Synthetic

SEQ ID NO: 4202 - protein, 7 aa, Artificial Sequence
  Synthetic
ATTLPNY

SEQ ID NO: 4203 - protein, 110 aa, Artificial Sequence; identical to SEQ ID NO: 2203
  Synthetic

SEQ ID NO: 4204 - protein, 9 aa, Artificial Sequence
  Synthetic
QSFDSSYWV

SEQ ID NO: 4205 - protein, 121 aa, Artificial Sequence; identical to SEQ ID NO: 1529
  Synthetic

SEQ ID NO: 4206 - protein, 14 aa, Artificial Sequence
  Synthetic
ARGVVGATPGSFDL

SEQ ID NO: 4207 - protein, 109 aa, Artificial Sequence; identical to SEQ ID NO: 2207
  Synthetic

SEQ ID NO: 4208 - protein, 9 aa, Artificial Sequence
  Synthetic
CSYAGSSVI

SEQ ID NO: 4209 - protein, 124 aa, Artificial Sequence; identical to SEQ ID NO: 2209
  Synthetic

SEQ ID NO: 4210 - protein, 17 aa, Artificial Sequence
  Synthetic
ARDYGSGSYYRGNWFDP

SEQ ID NO: 4211 - protein, 110 aa, Artificial Sequence; identical to SEQ ID NO: 1903
  Synthetic

SEQ ID NO: 4212 - protein, 10 aa, Artificial Sequence
  Synthetic
SSDAGSNNVV

SEQ ID NO: 4213 - protein, 120 aa, Artificial Sequence; identical to SEQ ID NO: 2213
  Synthetic

SEQ ID NO: 4214 - protein, 13 aa, Artificial Sequence
  Synthetic
ARAVTGWFLGIDF

SEQ ID NO: 4215 - protein, 111 aa, Artificial Sequence; identical to SEQ ID NO: 2215
  Synthetic

SEQ ID NO: 4216 - protein, 10 aa, Artificial Sequence
  Synthetic
QSYDGNYHWV

SEQ ID NO: 4217 - protein, 124 aa, Artificial Sequence; identical to SEQ ID NO: 2217
  Synthetic

SEQ ID NO: 4218 - protein, 17 aa, Artificial Sequence
  Synthetic
ARGGYCVGGTCQDWFDP

SEQ ID NO: 4219 - protein, 110 aa, Artificial Sequence; identical to SEQ ID NO: 2219
  Synthetic

SEQ ID NO: 4220 - protein, 13 aa, Artificial Sequence
  Synthetic
QVWDGTSDHPAYV

SEQ ID NO: 4221 - protein, 120 aa, Artificial Sequence; identical to SEQ ID NO: 2221
  Synthetic

SEQ ID NO: 4222 - protein, 13 aa, Artificial Sequence
  Synthetic
ATGGESGTSWFDP

SEQ ID NO: 4223 - protein, 110 aa, Artificial Sequence; identical to SEQ ID NO: 2223
  Synthetic

SEQ ID NO: 4224 - protein, 11 aa, Artificial Sequence
  Synthetic
AAWDDSQNGWV

SEQ ID NO: 4225 - protein, 126 aa, Artificial Sequence; identical to SEQ ID NO: 2225
  Synthetic

SEQ ID NO: 4226 - protein, 19 aa, Artificial Sequence
  Synthetic
ARLSYGHSGYTTVEDWFDP

SEQ ID NO: 4227 - protein, 110 aa, Artificial Sequence; identical to SEQ ID NO: 2227
  Synthetic

SEQ ID NO: 4228 - protein, 11 aa, Artificial Sequence
  Synthetic
QSYDSRLSASV

SEQ ID NO: 4229 - protein, 116 aa, Artificial Sequence; identical to SEQ ID NO: 2229
  Synthetic

SEQ ID NO: 4230 - protein, 11 aa, Artificial Sequence
  Synthetic
AKTIDTFFFDH

SEQ ID NO: 4231 - protein, 108 aa, Artificial Sequence; identical to SEQ ID NO: 2231
  Synthetic

SEQ ID NO: 4232 - protein, 11 aa, Artificial Sequence
  Synthetic
QVWDSSSDHWV

SEQ ID NO: 4233 - protein, 130 aa, Artificial Sequence; identical to SEQ ID NO: 2233
  Synthetic

SEQ ID NO: 4234 - protein, 23 aa, Artificial Sequence
  Synthetic
ARDRGGHDFWSGYGFYYYYGMDV

SEQ ID NO: 4235 - protein, 107 aa, Artificial Sequence; identical to SEQ ID NO: 2235
  Synthetic

SEQ ID NO: 4236 - protein, 9 aa, Artificial Sequence
  Synthetic
QKYNSAPRT

SEQ ID NO: 4237 - protein, 115 aa, Artificial Sequence; identical to SEQ ID NO: 2237
  Synthetic

SEQ ID NO: 4238 - protein, 9 aa, Artificial Sequence
  Synthetic
ARIANYMDV

SEQ ID NO: 4239 - protein, 108 aa, Artificial Sequence; identical to SEQ ID NO: 2239
  Synthetic

SEQ ID NO: 4240 - protein, 10 aa, Artificial Sequence
  Synthetic
QQYNNWPPLT

SEQ ID NO: 4241 - protein, 120 aa, Artificial Sequence; identical to SEQ ID NO: 2241
  Synthetic

SEQ ID NO: 4242 - protein, 13 aa, Artificial Sequence
  Synthetic
ARTWIQPHNWFDP

SEQ ID NO: 4243 - protein, 108 aa, Artificial Sequence; identical to SEQ ID NO: 2243
  Synthetic

SEQ ID NO: 4244 - protein, 10 aa, Artificial Sequence
  Synthetic
QQYNSYPLFT

SEQ ID NO: 4245 - protein, 126 aa, Artificial Sequence; identical to SEQ ID NO: 2245
  Synthetic

SEQ ID NO: 4246 - protein, 19 aa, Artificial Sequence
  Synthetic
AREAARRYDFWSGLNWFDP

SEQ ID NO: 4247 - protein, 113 aa, Artificial Sequence; identical to SEQ ID NO: 2247
  Synthetic
  misc_feature (15)..(15): Xaa can be any naturally occurring amino acid

SEQ ID NO: 4248 - protein, 9 aa, Artificial Sequence
  Synthetic
QQYYSTMLT

SEQ ID NO: 4249 - protein, 117 aa, Artificial Sequence; identical to SEQ ID NO: 2249
  Synthetic

SEQ ID NO: 4250 - protein, 11 aa, Artificial Sequence
  Synthetic
ARDYGDFYFDY

SEQ ID NO: 4251 - protein, 107 aa, Artificial Sequence; identical to SEQ ID NO: 2251
  Synthetic

SEQ ID NO: 4252 - protein, 9 aa, Artificial Sequence
  Synthetic
QQYNNWPRT

SEQ ID NO: 4253 - protein, 122 aa, Artificial Sequence; identical to SEQ ID NO: 1633
  Synthetic

SEQ ID NO: 4254 - protein, 13 aa, Artificial Sequence
  Synthetic
TTTNDYGDYSPAY

SEQ ID NO: 4255 - protein, 107 aa, Artificial Sequence; identical to SEQ ID NO: 2255
  Synthetic

SEQ ID NO: 4256 - protein, 9 aa, Artificial Sequence
  Synthetic
QQSYSTPLT

SEQ ID NO: 4257 - protein, 121 aa, Artificial Sequence; identical to SEQ ID NO: 2257
  Synthetic

SEQ ID NO: 4258 - protein, 14 aa, Artificial Sequence
  Synthetic
ASSSSTPDYYGMDV

SEQ ID NO: 4259 - protein, 108 aa, Artificial Sequence; identical to SEQ ID NO: 2259
  Synthetic

SEQ ID NO: 4260 - protein, 10 aa, Artificial Sequence
  Synthetic
QQLNSYPLCS

SEQ ID NO: 4261 - protein, 117 aa, Artificial Sequence; identical to SEQ ID NO: 2261
  Synthetic

SEQ ID NO: 4262 - protein, 11 aa, Artificial Sequence
  Synthetic
ARDYGDYYFDY

SEQ ID NO: 4263 - protein, 107 aa, Artificial Sequence; identical to SEQ ID NO: 2251
  Synthetic

SEQ ID NO: 4264 - protein, 9 aa, Artificial Sequence
  Synthetic
QQYNNWPRT

SEQ ID NO: 4265 - protein, 123 aa, Artificial Sequence; identical to SEQ ID NO: 2265
  Synthetic

SEQ ID NO: 4266 - protein, 16 aa, Artificial Sequence
  Synthetic
ARAGWELLRIRYYFDF

SEQ ID NO: 4267 - protein, 107 aa, Artificial Sequence; identical to SEQ ID NO: 2267
  Synthetic

SEQ ID NO: 4268 - protein, 9 aa, Artificial Sequence
  Synthetic
QQYDNLPPT

SEQ ID NO: 4269 - protein, 129 aa, Artificial Sequence; identical to SEQ ID NO: 2269
  Synthetic

SEQ ID NO: 4270 - protein, 22 aa, Artificial Sequence
  Synthetic
ARVPRGYYDRSGYYYLPHYLDY

SEQ ID NO: 4271 - protein, 108 aa, Artificial Sequence; identical to SEQ ID NO: 2271
  Synthetic

SEQ ID NO: 4272 - protein, 10 aa, Artificial Sequence
  Synthetic
QQYDSLPGCS

SEQ ID NO: 4273 - protein, 117 aa, Artificial Sequence; identical to SEQ ID NO: 2273
  Synthetic

SEQ ID NO: 4274 - protein, 10 aa, Artificial Sequence
  Synthetic
ARVVANWFDP

SEQ ID NO: 4275 - protein, 116 aa, Artificial Sequence; identical to SEQ ID NO: 2275
  Synthetic
  misc_feature (15)..(15): Xaa can be any naturally occurring amino acid

SEQ ID NO: 4276 - protein, 12 aa, Artificial Sequence
  Synthetic
QQYYSTPQPSWT

SEQ ID NO: 4277 - protein, 119 aa, Artificial Sequence; identical to SEQ ID NO: 2277
  Synthetic

SEQ ID NO: 4278 - protein, 13 aa, Artificial Sequence
  Synthetic
ARAISESPRYGVY

SEQ ID NO: 4279 - protein, 107 aa, Artificial Sequence; identical to SEQ ID NO: 2279
  Synthetic

SEQ ID NO: 4280 - protein, 9 aa, Artificial Sequence
  Synthetic
QQYDNLPLT

SEQ ID NO: 4281 - protein, 130 aa, Artificial Sequence; identical to SEQ ID NO: 2281
  Synthetic

SEQ ID NO: 4282 - protein, 23 aa, Artificial Sequence
  Synthetic
AREQEANYYDISGYYHWGESLGY

SEQ ID NO: 4283 - protein, 108 aa, Artificial Sequence; identical to SEQ ID NO: 2283
  Synthetic

SEQ ID NO: 4284 - protein, 11 aa, Artificial Sequence
  Synthetic
QKVNSHPPGLT

SEQ ID NO: 4285 - protein, 121 aa, Artificial Sequence; identical to SEQ ID NO: 2285
  Synthetic

SEQ ID NO: 4286 - protein, 14 aa, Artificial Sequence
  Synthetic
YALFERGNWNDAEY

SEQ ID NO: 4287 - protein, 112 aa, Artificial Sequence; identical to SEQ ID NO: 2287
  Synthetic

SEQ ID NO: 4288 - protein, 9 aa, Artificial Sequence
  Synthetic
MQGTHWPRT

SEQ ID NO: 4289 - protein, 118 aa, Artificial Sequence; identical to SEQ ID NO: 2289
  Synthetic

SEQ ID NO: 4290 - protein, 11 aa, Artificial Sequence
  Synthetic
ARVGYGYYFDY

SEQ ID NO: 4291 - protein, 106 aa, Artificial Sequence; identical to SEQ ID NO: 2291
  Synthetic

SEQ ID NO: 4292 - protein, 8 aa, Artificial Sequence
  Synthetic
QQRSNWPS

SEQ ID NO: 4293 - protein, 118 aa, Artificial Sequence; identical to SEQ ID NO: 2293
  Synthetic

SEQ ID NO: 4294 - skipped

SEQ ID NO: 4295 - protein, 107 aa, Artificial Sequence; identical to SEQ ID NO: 1203
  Synthetic

SEQ ID NO: 4296 - protein, 9 aa, Artificial Sequence
  Synthetic
QQYDNLPIT

SEQ ID NO: 4297 - protein, 125 aa, Artificial Sequence; identical to SEQ ID NO: 2297
  Synthetic

SEQ ID NO: 4298 - protein, 18 aa, Artificial Sequence
  Synthetic
AKVGLGYSSGWYGEEIDY

SEQ ID NO: 4299 - protein, 107 aa, Artificial Sequence; identical to SEQ ID NO: 2299
  Synthetic

SEQ ID NO: 4300 - protein, 9 aa, Artificial Sequence
  Synthetic
QQSYRTPLT

SEQ ID NO: 4301 - protein, 127 aa, Artificial Sequence; identical to SEQ ID NO: 2301
  Synthetic

SEQ ID NO: 4302 - protein, 20 aa, Artificial Sequence
  Synthetic
ARGGRYYDSSGYNGTYEFDY

SEQ ID NO: 4303 - protein, 108 aa, Artificial Sequence; identical to SEQ ID NO: 2303
  Synthetic

SEQ ID NO: 4304 - protein, 10 aa, Artificial Sequence
  Synthetic
QQYNNWPPVT

SEQ ID NO: 4305 - protein, 128 aa, Artificial Sequence; identical to SEQ ID NO: 2305
  Synthetic

SEQ ID NO: 4306 - protein, 22 aa, Artificial Sequence
  Synthetic
ARGPPRLLWFGESPPTYWYFNL

SEQ ID NO: 4307 - protein, 113 aa, Artificial Sequence; identical to SEQ ID NO: 2307
  Synthetic
  misc_feature (15)..(15): Xaa can be any naturally occurring amino acid

SEQ ID NO: 4308 - protein, 9 aa, Artificial Sequence
  Synthetic
QQYYSTPLT

SEQ ID NO: 4309 - protein, 116 aa, Artificial Sequence; identical to SEQ ID NO: 2309
  Synthetic

SEQ ID NO: 4310 - protein, 9 aa, Artificial Sequence
  Synthetic
ARVAAFLDY

SEQ ID NO: 4311 - protein, 106 aa, Artificial Sequence; identical to SEQ ID NO: 2311
  Synthetic

SEQ ID NO: 4312 - protein, 8 aa, Artificial Sequence
  Synthetic
QQYYSTRT

SEQ ID NO: 4313 - protein, 125 aa, Artificial Sequence; identical to SEQ ID NO: 2313
  Synthetic

SEQ ID NO: 4314 - protein, 18 aa, Artificial Sequence
  Synthetic
ARDLRYCSGGRCLWWFDP

SEQ ID NO: 4315 - protein, 107 aa, Artificial Sequence; identical to SEQ ID NO: 2315
  Synthetic

SEQ ID NO: 4316 - protein, 9 aa, Artificial Sequence
  Synthetic
QQSYSTPRT

SEQ ID NO: 4317 - protein, 123 aa, Artificial Sequence; identical to SEQ ID NO: 2317
  Synthetic

SEQ ID NO: 4318 - protein, 16 aa, Artificial Sequence
  Synthetic
AKNVGTGYNVMYYFDY

SEQ ID NO: 4319 - protein, 107 aa, Artificial Sequence; identical to SEQ ID NO: 2319
  Synthetic

SEQ ID NO: 4320 - protein, 9 aa, Artificial Sequence
  Synthetic
QQYDNLPIT

SEQ ID NO: 4321 - protein, 128 aa, Artificial Sequence; identical to SEQ ID NO: 2321
  Synthetic

SEQ ID NO: 4322 - protein, 20 aa, Artificial Sequence
  Synthetic
ARYTYYYDRSGYYRPDYFDY

SEQ ID NO: 4323 - protein, 107 aa, Artificial Sequence; identical to SEQ ID NO: 2323
  Synthetic

SEQ ID NO: 4324 - protein, 9 aa, Artificial Sequence
  Synthetic
QQFNSYQLT

SEQ ID NO: 4325 - protein, 117 aa, Artificial Sequence; identical to SEQ ID NO: 2325
  Synthetic

SEQ ID NO: 4326 - protein, 11 aa, Artificial Sequence
  Synthetic
ARDFGEFYFDY

SEQ ID NO: 4327 - protein, 107 aa, Artificial Sequence; identical to SEQ ID NO: 2327
  Synthetic

SEQ ID NO: 4328 - protein, 9 aa, Artificial Sequence
  Synthetic
QQYNNWPRT

SEQ ID NO: 4329 - protein, 122 aa, Artificial Sequence; identical to SEQ ID NO: 2329
  Synthetic

SEQ ID NO: 4330 - protein, 15 aa, Artificial Sequence
  Synthetic
AKDLGSSLYYDAFDI

SEQ ID NO: 4331 - protein, 108 aa, Artificial Sequence; identical to SEQ ID NO: 2331
  Synthetic

SEQ ID NO: 4332 - protein, 10 aa, Artificial Sequence
  Synthetic
QQSYSTPPWT

SEQ ID NO: 4333 - protein, 123 aa, Artificial Sequence; identical to SEQ ID NO: 2333
  Synthetic

SEQ ID NO: 4334 - protein, 16 aa, Artificial Sequence
  Synthetic
ARDGLNWNVPHYGMDV

SEQ ID NO: 4335 - protein, 108 aa, Artificial Sequence; identical to SEQ ID NO: 2335
  Synthetic

SEQ ID NO: 4336 - protein, 10 aa, Artificial Sequence
  Synthetic
QQANSFPPLT

SEQ ID NO: 4337 - protein, 125 aa, Artificial Sequence; identical to SEQ ID NO: 2337
  Synthetic

SEQ ID NO: 4338 - protein, 18 aa, Artificial Sequence
  Synthetic
AKVGMEYSSGWYGEEIDF

SEQ ID NO: 4339 - protein, 107 aa, Artificial Sequence; identical to SEQ ID NO: 2339
  Synthetic

SEQ ID NO: 4340 - protein, 9 aa, Artificial Sequence
  Synthetic
QQSYRTPLT

SEQ ID NO: 4341 - protein, 125 aa, Artificial Sequence; identical to SEQ ID NO: 2341
  Synthetic

SEQ ID NO: 4342 - protein, 18 aa, Artificial Sequence
  Synthetic
ARDSAYSGYDFFEAPRDY

SEQ ID NO: 4343 - protein, 106 aa, Artificial Sequence; identical to SEQ ID NO: 2343
  Synthetic

SEQ ID NO: 4344 - protein, 9 aa, Artificial Sequence
  Synthetic
QQSYRTPPL

SEQ ID NO: 4345 - protein, 120 aa, Artificial Sequence; identical to SEQ ID NO: 2345
  Synthetic

SEQ ID NO: 4346 - protein, 13 aa, Artificial Sequence
  Synthetic
ARDVASNYAYFDL

SEQ ID NO: 4347 - protein, 108 aa, Artificial Sequence; identical to SEQ ID NO: 2347
  Synthetic

SEQ ID NO: 4348 - protein, 10 aa, Artificial Sequence
  Synthetic
QQSYSTPPLT

SEQ ID NO: 4349 - protein, 127 aa, Artificial Sequence; identical to SEQ ID NO: 2349
  Synthetic

SEQ ID NO: 4350 - protein, 20 aa, Artificial Sequence
  Synthetic
AKQAGPYCSGGSCYSAPFDY

SEQ ID NO: 4351 - protein, 107 aa, Artificial Sequence; identical to SEQ ID NO: 2351
  Synthetic

SEQ ID NO: 4352 - protein, 9 aa, Artificial Sequence
  Synthetic
QQYDNLPIT

SEQ ID NO: 4353 - protein, 117 aa, Artificial Sequence; identical to SEQ ID NO: 2353
  Synthetic

SEQ ID NO: 4354 - protein, 11 aa, Artificial Sequence
  Synthetic
ARDRVIYGMDV

SEQ ID NO: 4355 - protein, 107 aa, Artificial Sequence; identical to SEQ ID NO: 2355
  Synthetic

SEQ ID NO: 4356 - protein, 9 aa, Artificial Sequence
  Synthetic
QQYDNLPQT

SEQ ID NO: 4357 - protein, 125 aa, Artificial Sequence; identical to SEQ ID NO: 2357
  Synthetic

SEQ ID NO: 4358 - protein, 23 aa, Artificial Sequence
  Synthetic
ARDSSEVRDHPGHPGRSVGAFDI

SEQ ID NO: 4359 - protein, 113 aa, Artificial Sequence; identical to SEQ ID NO: 2359
  Synthetic
  misc_feature (15)..(15): Xaa can be any naturally occurring amino acid

SEQ ID NO: 4360 - protein, 9 aa, Artificial Sequence
  Synthetic
QQYYSTPLT

SEQ ID NO: 4361 - protein, 115 aa, Artificial Sequence; identical to SEQ ID NO: 2361
  Synthetic

SEQ ID NO: 4362 - protein, 9 aa, Artificial Sequence
  Synthetic
ARIANYMDV

SEQ ID NO: 4363 - protein, 108 aa, Artificial Sequence; identical to SEQ ID NO: 2239
  Synthetic

SEQ ID NO: 4364 - protein, 10 aa, Artificial Sequence
  Synthetic
QQYNNWPPLT

SEQ ID NO: 4365 - protein, 130 aa, Artificial Sequence; identical to SEQ ID NO: 2365
  Synthetic

SEQ ID NO: 4366 - protein, 23 aa, Artificial Sequence
  Synthetic
ARDRGGHNFWSGYGYYYYYGMDV

SEQ ID NO: 4367 - protein, 107 aa, Artificial Sequence; identical to SEQ ID NO: 2367
  Synthetic
  misc_feature (12)..(12): Xaa can be any naturally occurring amino acid

SEQ ID NO: 4368 - protein, 9 aa, Artificial Sequence
  Synthetic
QKYNSAPRT

SEQ ID NO: 4369 - protein, 119 aa, Artificial Sequence; identical to SEQ ID NO: 2369
  Synthetic

SEQ ID NO: 4370 - protein, 13 aa, Artificial Sequence
  Synthetic
ARLLVATIKDFDS

SEQ ID NO: 4371 - protein, 108 aa, Artificial Sequence; identical to SEQ ID NO: 2371
  Synthetic

SEQ ID NO: 4372 - protein, 10 aa, Artificial Sequence
  Synthetic
QQYNDWPPWT

SEQ ID NO: 4373 - protein, 122 aa, Artificial Sequence; identical to SEQ ID NO: 85
  Synthetic

SEQ ID NO: 4374 - protein, 15 aa, Artificial Sequence
  Synthetic
VKDKEHSTMVTIFDF

SEQ ID NO: 4375 - protein, 107 aa, Artificial Sequence; identical to SEQ ID NO: 2375
  Synthetic

SEQ ID NO: 4376 - protein, 9 aa, Artificial Sequence
  Synthetic
QQSYSSHLT

SEQ ID NO: 4377 - protein, 124 aa, Artificial Sequence; identical to SEQ ID NO: 2377
  Synthetic

SEQ ID NO: 4378 - protein, 17 aa, Artificial Sequence
  Synthetic
AKALFFYFDTSGGTFDY

SEQ ID NO: 4379 - protein, 102 aa, Artificial Sequence; identical to SEQ ID NO: 2379
  Synthetic

SEQ ID NO: 4380 - protein, 5 aa, Artificial Sequence
  Synthetic
QQGFT

SEQ ID NO: 4381 - protein, 122 aa, Artificial Sequence; identical to SEQ ID NO: 2381
  Synthetic

SEQ ID NO: 4382 - protein, 15 aa, Artificial Sequence
  Synthetic
ARDSGFITFSEAFDI

SEQ ID NO: 4383 - protein, 108 aa, Artificial Sequence; identical to SEQ ID NO: 2383
  Synthetic

SEQ ID NO: 4384 - protein, 9 aa, Artificial Sequence
  Synthetic
QQYGSSPRT

SEQ ID NO: 4385 - protein, 131 aa, Artificial Sequence; identical to SEQ ID NO: 2385
  Synthetic

SEQ ID NO: 4386 - protein, 24 aa, Artificial Sequence
  Synthetic
ARGSLAVAGSLVFPPNYYYYDMDV

SEQ ID NO: 4387 - protein, 112 aa, Artificial Sequence; identical to SEQ ID NO: 2387
  Synthetic

SEQ ID NO: 4388 - protein, 9 aa, Artificial Sequence
  Synthetic
VQGTHWPCS

SEQ ID NO: 4389 - protein, 119 aa, Artificial Sequence; identical to SEQ ID NO: 2389
  Synthetic

SEQ ID NO: 4390 - protein, 13 aa, Artificial Sequence
  Synthetic
ARMDSSSWSWFDP

SEQ ID NO: 4391 - protein, 107 aa, Artificial Sequence; identical to SEQ ID NO: 2391
  Synthetic

SEQ ID NO: 4392 - protein, 9 aa, Artificial Sequence
  Synthetic
QQSYSSPPT

SEQ ID NO: 4393 - protein, 117 aa, Artificial Sequence; identical to SEQ ID NO: 2393
  Synthetic

SEQ ID NO: 4394 - protein, 11 aa, Artificial Sequence
  Synthetic
VRDFGEFYFDY

SEQ ID NO: 4395 - protein, 107 aa, Artificial Sequence; identical to SEQ ID NO: 2395
  Synthetic
  misc_feature (58)..(58): Xaa can be any naturally occurring amino acid
  misc_feature (84)..(84): Xaa can be any naturally occurring amino acid
  misc_feature (87)..(87): Xaa can be any naturally occurring amino acid

SEQ ID NO: 4396 - protein, 9 aa, Artificial Sequence
  Synthetic
QQYYSGPRT

SEQ ID NO: 4397 - protein, 131 aa, Artificial Sequence; identical to SEQ ID NO: 2397
  Synthetic

SEQ ID NO: 4398 - protein, 25 aa, Artificial Sequence
  Synthetic
ARAKFPPGYYDILNGYTEKGYYFDY

SEQ ID NO: 4399 - protein, 109 aa, Artificial Sequence; identical to SEQ ID NO: 2399
  Synthetic

SEQ ID NO: 4400 - protein, 11 aa, Artificial Sequence
  Synthetic
QQYNDWPPEYT

SEQ ID NO: 4401 - protein, 122 aa, Artificial Sequence; identical to SEQ ID NO: 2401
  Synthetic

SEQ ID NO: 4402 - protein, 15 aa, Artificial Sequence
  Synthetic
SRDQCFLPGGCGMDV

SEQ ID NO: 4403 - protein, 108 aa, Artificial Sequence; identical to SEQ ID NO: 2403
  Synthetic

SEQ ID NO: 4404 - protein, 10 aa, Artificial Sequence
  Synthetic
QHYNKWPPWT

SEQ ID NO: 4405 - protein, 120 aa, Artificial Sequence; identical to SEQ ID NO: 93
  Synthetic

SEQ ID NO: 4406 - protein, 13 aa, Artificial Sequence
  Synthetic
ARDPMIVVVEMDY

SEQ ID NO: 4407 - protein, 112 aa, Artificial Sequence; identical to SEQ ID NO: 94
  Synthetic

SEQ ID NO: 4408 - protein, 9 aa, Artificial Sequence
  Synthetic
MQGSHWPYT

SEQ ID NO: 4409 - protein, 127 aa, Artificial Sequence; identical to SEQ ID NO: 2409
  Synthetic

SEQ ID NO: 4410 - protein, 20 aa, Artificial Sequence
  Synthetic
AKGGGQYCSHGNCYLNYFDY

SEQ ID NO: 4411 - protein, 107 aa, Artificial Sequence; identical to SEQ ID NO: 122
  Synthetic

SEQ ID NO: 4412 - protein, 9 aa, Artificial Sequence
  Synthetic
QQYANLPTT

SEQ ID NO: 4413 - protein, 122 aa, Artificial Sequence; identical to SEQ ID NO: 99
  Synthetic

SEQ ID NO: 4414 - protein, 15 aa, Artificial Sequence
  Synthetic
ARGDCTSSSCYSLDY

SEQ ID NO: 4415 - protein, 107 aa, Artificial Sequence; identical to SEQ ID NO: 2415
  Synthetic

SEQ ID NO: 4416 - protein, 9 aa, Artificial Sequence
  Synthetic
QQTYRFPLT

SEQ ID NO: 4417 - protein, 122 aa, Artificial Sequence; identical to SEQ ID NO: 2417
  Synthetic

SEQ ID NO: 4418 - protein, 15 aa, Artificial Sequence
  Synthetic
VKDKEETTMVTIFDY

SEQ ID NO: 4419 - protein, 107 aa, Artificial Sequence; identical to SEQ ID NO: 2419
  Synthetic

SEQ ID NO: 4420 - protein, 9 aa, Artificial Sequence
  Synthetic
QQSYSSHLT

SEQ ID NO: 4421 - protein, 129 aa, Artificial Sequence; identical to SEQ ID NO: 2421
  Synthetic

SEQ ID NO: 4422 - protein, 22 aa, Artificial Sequence
  Synthetic
AKGGGYNLNDRGDYYYDYYMDV

SEQ ID NO: 4423 - protein, 107 aa, Artificial Sequence; identical to SEQ ID NO: 2423
  Synthetic

SEQ ID NO: 4424 - protein, 9 aa, Artificial Sequence
  Synthetic
QQYGSSPST

SEQ ID NO: 4425 - protein, 120 aa, Artificial Sequence; identical to SEQ ID NO: 2425
  Synthetic

SEQ ID NO: 4426 - protein, 13 aa, Artificial Sequence
  Synthetic
TRDPYDDYSWFDP

SEQ ID NO: 4427 - protein, 107 aa, Artificial Sequence; identical to SEQ ID NO: 2427
  Synthetic

SEQ ID NO: 4428 - protein, 9 aa, Artificial Sequence
  Synthetic
QHSYSIPPA

SEQ ID NO: 4429 - protein, 122 aa, Artificial Sequence; identical to SEQ ID NO: 2429
  Synthetic

SEQ ID NO: 4430 - protein, 15 aa, Artificial Sequence
  Synthetic
ATEVHTPLVIGCPDY

SEQ ID NO: 4431 - protein, 109 aa, Artificial Sequence; identical to SEQ ID NO: 2431
  Synthetic

SEQ ID NO: 4432 - protein, 11 aa, Artificial Sequence
  Synthetic
QQYHIWPPEFT

SEQ ID NO: 4433 - protein, 122 aa, Artificial Sequence; identical to SEQ ID NO: 2433
  Synthetic

SEQ ID NO: 4434 - protein, 15 aa, Artificial Sequence
  Synthetic
ARGDLIIPARGYLDY

SEQ ID NO: 4435 - protein, 108 aa, Artificial Sequence; identical to SEQ ID NO: 2435
  Synthetic

SEQ ID NO: 4436 - protein, 10 aa, Artificial Sequence
  Synthetic
QQRNNWPRVT

SEQ ID NO: 4437 - protein, 121 aa, Artificial Sequence; identical to SEQ ID NO: 2437
  Synthetic

SEQ ID NO: 4438 - protein, 13 aa, Artificial Sequence
  Synthetic
ARGGSGSFFVFDI

SEQ ID NO: 4439 - protein, 108 aa, Artificial Sequence; identical to SEQ ID NO: 2439
  Synthetic

SEQ ID NO: 4440 - protein, 10 aa, Artificial Sequence
  Synthetic
QQYDNLLPLT

SEQ ID NO: 4441 - protein, 130 aa, Artificial Sequence; identical to SEQ ID NO: 2441
  Synthetic

SEQ ID NO: 4442 - protein, 23 aa, Artificial Sequence
  Synthetic
ARIASFRSSGSESYYPTQNFMDV

SEQ ID NO: 4443 - protein, 108 aa, Artificial Sequence; identical to SEQ ID NO: 2443
  Synthetic

SEQ ID NO: 4444 - protein, 9 aa, Artificial Sequence
  Synthetic
QQYGSLLLT

SEQ ID NO: 4445 - protein, 123 aa, Artificial Sequence; identical to SEQ ID NO: 2445
  Synthetic

SEQ ID NO: 4446 - protein, 16 aa, Artificial Sequence
  Synthetic
AKDSSFGSNWYYYFDY

SEQ ID NO: 4447 - protein, 106 aa, Artificial Sequence; identical to SEQ ID NO: 2447
  Synthetic

SEQ ID NO: 4448 - protein, 8 aa, Artificial Sequence
  Synthetic
QQFNSYPT

SEQ ID NO: 4449 - protein, 118 aa, Artificial Sequence; identical to SEQ ID NO: 107
  Synthetic

SEQ ID NO: 4450 - protein, 11 aa, Artificial Sequence
  Synthetic
TINTQWDLVPR

SEQ ID NO: 4451 - protein, 108 aa, Artificial Sequence; identical to SEQ ID NO: 108
  Synthetic

SEQ ID NO: 4452 - protein, 9 aa, Artificial Sequence
  Synthetic
QQYGSSLYT

SEQ ID NO: 4453 - protein, 127 aa, Artificial Sequence; identical to SEQ ID NO: 119
  Synthetic

SEQ ID NO: 4454 - protein, 20 aa, Artificial Sequence
  Synthetic
AKAGGPYYYDTSGSFWYFDY

SEQ ID NO: 4455 - protein, 103 aa, Artificial Sequence; identical to SEQ ID NO: 2455
  Synthetic

SEQ ID NO: 4456 - protein, 5 aa, Artificial Sequence
  Synthetic
QQSYS

SEQ ID NO: 4457 - protein, 127 aa, Artificial Sequence; identical to SEQ ID NO: 129
  Synthetic

SEQ ID NO: 4458 - protein, 20 aa, Artificial Sequence
  Synthetic
ARDFESRTWDPPKYYYALDV

SEQ ID NO: 4459 - protein, 108 aa, Artificial Sequence; identical to SEQ ID NO: 130
  Synthetic

SEQ ID NO: 4460 - protein, 10 aa, Artificial Sequence
  Synthetic
QQTYTTPTWT

SEQ ID NO: 4461 - protein, 125 aa, Artificial Sequence; identical to SEQ ID NO: 2461
  Synthetic

SEQ ID NO: 4462 - protein, 16 aa, Artificial Sequence
  Synthetic
ARGVDTTMITGAFFDY

SEQ ID NO: 4463 - protein, 109 aa, Artificial Sequence; identical to SEQ ID NO: 2463
  Synthetic

SEQ ID NO: 4464 - protein, 11 aa, Artificial Sequence
  Synthetic
QQYHNWPPGLT

SEQ ID NO: 4465 - protein, 123 aa, Artificial Sequence; identical to SEQ ID NO: 2465
  Synthetic

SEQ ID NO: 4466 - protein, 16 aa, Artificial Sequence
  Synthetic
TRNSADDKVWGSPYDY

SEQ ID NO: 4467 - protein, 107 aa, Artificial Sequence; identical to SEQ ID NO: 2467
  Synthetic

SEQ ID NO: 4468 - protein, 9 aa, Artificial Sequence
  Synthetic
QQYNYWPPS

SEQ ID NO: 4469 - protein, 118 aa, Artificial Sequence; identical to SEQ ID NO: 89
  Synthetic

SEQ ID NO: 4470 - protein, 12 aa, Artificial Sequence
  Synthetic
ARESGSYGTFDY

SEQ ID NO: 4471 - protein, 108 aa, Artificial Sequence; identical to SEQ ID NO: 90
  Synthetic

SEQ ID NO: 4472 - protein, 9 aa, Artificial Sequence
  Synthetic
QQYAYTIWT

SEQ ID NO: 4473 - protein, 130 aa, Artificial Sequence; identical to SEQ ID NO: 2473
  Synthetic

SEQ ID NO: 4474 - protein, 23 aa, Artificial Sequence
  Synthetic
ARGGWDPAEYSSSGGGGLDAFDI

SEQ ID NO: 4475 - protein, 107 aa, Artificial Sequence; identical to SEQ ID NO: 2475
  Synthetic

SEQ ID NO: 4476 - protein, 9 aa, Artificial Sequence
  Synthetic
QQRSSWPLT

SEQ ID NO: 4477 - protein, 117 aa, Artificial Sequence; identical to SEQ ID NO: 2477
  Synthetic

SEQ ID NO: 4478 - protein, 11 aa, Artificial Sequence
  Synthetic
AREGVRGELRD

SEQ ID NO: 4479 - protein, 109 aa, Artificial Sequence; identical to SEQ ID NO: 2479
  Synthetic

SEQ ID NO: 4480 - protein, 10 aa, Artificial Sequence
  Synthetic
QQYGSSQGYT

SEQ ID NO: 4481 - protein, 120 aa, Artificial Sequence; identical to SEQ ID NO: 2481
  Synthetic

SEQ ID NO: 4482 - protein, 13 aa, Artificial Sequence
  Synthetic
VKDYGGYIDAFDI

SEQ ID NO: 4483 - protein, 107 aa, Artificial Sequence; identical to SEQ ID NO: 2483
  Synthetic

SEQ ID NO: 4484 - protein, 9 aa, Artificial Sequence
  Synthetic
QQSYTTPYT

SEQ ID NO: 4485 - protein, 127 aa, Artificial Sequence; identical to SEQ ID NO: 115
  Synthetic

SEQ ID NO: 4486 - protein, 20 aa, Artificial Sequence
  Synthetic
GRIAPPGRGSYYPTQNYMDV

SEQ ID NO: 4487 - protein, 108 aa, Artificial Sequence; identical to SEQ ID NO: 116
  Synthetic

SEQ ID NO: 4488 - protein, 9 aa, Artificial Sequence
  Synthetic
QQYGSLLLT

SEQ ID NO: 4489 - protein, 120 aa, Artificial Sequence; identical to SEQ ID NO: 2489
  Synthetic

SEQ ID NO: 4490 - protein, 13 aa, Artificial Sequence
  Synthetic
ARDPTVTEFRLDY

SEQ ID NO: 4491 - protein, 106 aa, Artificial Sequence; identical to SEQ ID NO: 2491
  Synthetic

SEQ ID NO: 4492 - protein, 8 aa, Artificial Sequence
  Synthetic
QHYDILPL

SEQ ID NO: 4493 - protein, 121 aa, Artificial Sequence; identical to SEQ ID NO: 2493
  Synthetic

SEQ ID NO: 4494 - protein, 14 aa, Artificial Sequence
  Synthetic
ARAGVAYGDYVPDY

SEQ ID NO: 4495 - protein, 108 aa, Artificial Sequence; identical to SEQ ID NO: 2495
  Synthetic

SEQ ID NO: 4496 - protein, 9 aa, Artificial Sequence
  Synthetic
QQYGSPPWT

SEQ ID NO: 4497 - protein, 123 aa, Artificial Sequence; identical to SEQ ID NO: 2497
  Synthetic

SEQ ID NO: 4498 - protein, 17 aa, Artificial Sequence
  Synthetic
ARDRRLGLPFYYFYMDV

SEQ ID NO: 4499 - protein, 109 aa, Artificial Sequence; identical to SEQ ID NO: 2499
  Synthetic

SEQ ID NO: 4500 - protein, 10 aa, Artificial Sequence
  Synthetic
QQYGDSFSIT

SEQ ID NO: 4501 - protein, 118 aa, Artificial Sequence; identical to SEQ ID NO: 2501
  Synthetic

SEQ ID NO: 4502 - protein, 11 aa, Artificial Sequence
  Synthetic
TLNTQWDLVPR

SEQ ID NO: 4503 - protein, 114 aa, Artificial Sequence; identical to SEQ ID NO: 2503
  Synthetic
  misc_feature (9)..(10): Xaa can be any naturally occurring amino acid

SEQ ID NO: 4504 - protein, 15 aa, Artificial Sequence
  Synthetic
QHYGGSLNTFGQGTT

SEQ ID NO: 4505 - protein, 121 aa, Artificial Sequence; identical to SEQ ID NO: 2505
  Synthetic

SEQ ID NO: 4506 - protein, 14 aa, Artificial Sequence
  Synthetic
AKGIGAVGPGFFDY

SEQ ID NO: 4507 - protein, 108 aa, Artificial Sequence; identical to SEQ ID NO: 2507
  Synthetic

SEQ ID NO: 4508 - protein, 10 aa, Artificial Sequence
  Synthetic
QQYYSTPPLT

SEQ ID NO: 4509 - protein, 118 aa, Artificial Sequence; identical to SEQ ID NO: 2509
  Synthetic

SEQ ID NO: 4510 - protein, 12 aa, Artificial Sequence
  Synthetic
AREAVAGRIVPV

SEQ ID NO: 4511 - protein, 107 aa, Artificial Sequence; identical to SEQ ID NO: 2511
  Synthetic
  misc_feature (9)..(10): Xaa can be any naturally occurring amino acid

SEQ ID NO: 4512 - protein, 9 aa, Artificial Sequence
  Synthetic
QQYDNLPIT

SEQ ID NO: 4513 - protein, 128 aa, Artificial Sequence; identical to SEQ ID NO: 2513
  Synthetic

SEQ ID NO: 4514 - protein, 22 aa, Artificial Sequence
  Synthetic
ARSESNAIFGAVSWWSTYYMDA

SEQ ID NO: 4515 - protein, 108 aa, Artificial Sequence; identical to SEQ ID NO: 2515
  Synthetic

SEQ ID NO: 4516 - protein, 9 aa, Artificial Sequence
  Synthetic
QQYGSSPIT

SEQ ID NO: 4517 - protein, 143 aa, Artificial Sequence; identical to SEQ ID NO: 2517
  Synthetic

SEQ ID NO: 4518 - protein, 21 aa, Artificial Sequence
  Synthetic
AKEPRGYYDRSGDYYILPPDF

SEQ ID NO: 4519 - protein, 107 aa, Artificial Sequence; identical to SEQ ID NO: 2519
  Synthetic

SEQ ID NO: 4520 - protein, 9 aa, Artificial Sequence
  Synthetic
LQHNSYPLT

SEQ ID NO: 4521 - protein, 117 aa, Artificial Sequence; identical to SEQ ID NO: 2521
  Synthetic

SEQ ID NO: 4522 - protein, 11 aa, Artificial Sequence
  Synthetic
VINTQWDLLLY

SEQ ID NO: 4523 - protein, 109 aa, Artificial Sequence; identical to SEQ ID NO: 2523
  Synthetic

SEQ ID NO: 4524 - protein, 10 aa, Artificial Sequence
  Synthetic
QKYDISPRGT

SEQ ID NO: 4525 - protein, 119 aa, Artificial Sequence; identical to SEQ ID NO: 2525
  Synthetic

SEQ ID NO: 4526 - protein, 11 aa, Artificial Sequence
  Synthetic
ARVVAFGIFDY

SEQ ID NO: 4527 - protein, 109 aa, Artificial Sequence; identical to SEQ ID NO: 2527
  Synthetic

SEQ ID NO: 4528 - protein, 11 aa, Artificial Sequence
  Synthetic
QQYDNLPPRCS

SEQ ID NO: 4529 - protein, 127 aa, Artificial Sequence; identical to SEQ ID NO: 123
  Synthetic

SEQ ID NO: 4530 - protein, 20 aa, Artificial Sequence
  Synthetic
ARRDCSTTSCYDEVLYRLVD

SEQ ID NO: 4531 - protein, 108 aa, Artificial Sequence; identical to SEQ ID NO: 124
  Synthetic

SEQ ID NO: 4532 - protein, 9 aa, Artificial Sequence
  Synthetic
QQYGNSPRT

SEQ ID NO: 4533 - protein, 117 aa, Artificial Sequence; identical to SEQ ID NO: 83
  Synthetic

SEQ ID NO: 4534 - protein, 11 aa, Artificial Sequence
  Synthetic
ARDLIVLGVDV

SEQ ID NO: 4535 - protein, 108 aa, Artificial Sequence; identical to SEQ ID NO: 2535
  Synthetic

SEQ ID NO: 4536 - protein, 10 aa, Artificial Sequence
  Synthetic
QLLNSYPMCS

SEQ ID NO: 4537 - protein, 122 aa, Artificial Sequence; identical to SEQ ID NO: 2537
  Synthetic

SEQ ID NO: 4538 - protein, 15 aa, Artificial Sequence
  Synthetic
ARGHYHYYSRGAFDF

SEQ ID NO: 4539 - protein, 107 aa, Artificial Sequence; identical to SEQ ID NO: 2539
  Synthetic

SEQ ID NO: 4540 - protein, 9 aa, Artificial Sequence
  Synthetic
QQYDSLFRS

SEQ ID NO: 4541 - protein, 117 aa, Artificial Sequence; identical to SEQ ID NO: 2541
  Synthetic

SEQ ID NO: 4542 - protein, 11 aa, Artificial Sequence
  Synthetic
TRDLVTNGIDC

SEQ ID NO: 4543 - protein, 108 aa, Artificial Sequence; identical to SEQ ID NO: 2543
  Synthetic

SEQ ID NO: 4544 - protein, 10 aa, Artificial Sequence
  Synthetic
QLLNSYPLCS

SEQ ID NO: 4545 - protein, 125 aa, Artificial Sequence; identical to SEQ ID NO: 2545
  Synthetic

SEQ ID NO: 4546 - protein, 18 aa, Artificial Sequence
  Synthetic
AKGGFYGIRGSYRPTFDY

SEQ ID NO: 4547 - protein, 109 aa, Artificial Sequence; identical to SEQ ID NO: 2547
  Synthetic

SEQ ID NO: 4548 - protein, 11 aa, Artificial Sequence
  Synthetic
QQYDSLPPLCT

SEQ ID NO: 4549 - protein, 124 aa, Artificial Sequence; identical to SEQ ID NO: 2549
  Synthetic

SEQ ID NO: 4550 - protein, 17 aa, Artificial Sequence
  Synthetic
AREGIAATPSASDAFDI

SEQ ID NO: 4551 - protein, 107 aa, Artificial Sequence; identical to SEQ ID NO: 2551
  Synthetic
  misc_feature (9)..(10): Xaa can be any naturally occurring amino acid

SEQ ID NO: 4552 - protein, 9 aa, Artificial Sequence
  Synthetic
QQSYSTPYT

SEQ ID NO: 4553 - protein, 129 aa, Artificial Sequence; identical to SEQ ID NO: 2553
  Synthetic

SEQ ID NO: 4554 - protein, 22 aa, Artificial Sequence
  Synthetic
ARHERSYYDRSGYYERRTLNDY

SEQ ID NO: 4555 - protein, 108 aa, Artificial Sequence; identical to SEQ ID NO: 2555
  Synthetic

SEQ ID NO: 4556 - protein, 9 aa, Artificial Sequence
  Synthetic
QQYGSSPYT

SEQ ID NO: 4557 - protein, 127 aa, Artificial Sequence; identical to SEQ ID NO: 131
  Synthetic

SEQ ID NO: 4558 - protein, 20 aa, Artificial Sequence
  Synthetic
ARLSWSPPTRTTDEKNWFDP

SEQ ID NO: 4559 - protein, 107 aa, Artificial Sequence; identical to SEQ ID NO: 2559
  Synthetic

SEQ ID NO: 4560 - protein, 9 aa, Artificial Sequence
  Synthetic
QQFNSDPLT

SEQ ID NO: 4561 - protein, 134 aa, Artificial Sequence; identical to SEQ ID NO: 2561
  Synthetic

SEQ ID NO: 4562 - protein, 27 aa, Artificial Sequence
  Synthetic
ARDFGSDGYCGGDCYSSGYYYYYGMDV

SEQ ID NO: 4563 - protein, 109 aa, Artificial Sequence; identical to SEQ ID NO: 2563
  Synthetic

SEQ ID NO: 4564 - protein, 11 aa, Artificial Sequence
  Synthetic
QQRVNWPPRFT

SEQ ID NO: 4565 - protein, 118 aa, Artificial Sequence; identical to SEQ ID NO: 2565
  Synthetic

SEQ ID NO: 4566 - protein, 10 aa, Artificial Sequence
  Synthetic
ARVAAGSFDY

SEQ ID NO: 4567 - protein, 109 aa, Artificial Sequence; identical to SEQ ID NO: 2567
  Synthetic

SEQ ID NO: 4568 - protein, 11 aa, Artificial Sequence
  Synthetic
QQYDNLPPMST

SEQ ID NO: 4569 - protein, 118 aa, Artificial Sequence; identical to SEQ ID NO: 2569
  Synthetic

SEQ ID NO: 4570 - protein, 10 aa, Artificial Sequence
  Synthetic
ARCAAGSLDY

SEQ ID NO: 4571 - protein, 107 aa, Artificial Sequence; identical to SEQ ID NO: 2571
  Synthetic

SEQ ID NO: 4572 - protein, 9 aa, Artificial Sequence
  Synthetic
QQYDHVSCS

SEQ ID NO: 4573 - protein, 126 aa, Artificial Sequence; identical to SEQ ID NO: 2573
  Synthetic

SEQ ID NO: 4574 - protein, 19 aa, Artificial Sequence
  Synthetic
ARDGAFGIRYPYYFYGMDV

SEQ ID NO: 4575 - protein, 111 aa, Artificial Sequence; identical to SEQ ID NO: 2575
  Synthetic
  misc_feature (9)..(9): Xaa can be any naturally occurring amino acid

SEQ ID NO: 4576 - protein, 9 aa, Artificial Sequence
  Synthetic
MQGIYLPPT

SEQ ID NO: 4577 - protein, 117 aa, Artificial Sequence; identical to SEQ ID NO: 81
  Synthetic

SEQ ID NO: 4578 - protein, 11 aa, Artificial Sequence
  Synthetic
VRDFGEFYFDY

SEQ ID NO: 4579 - protein, 107 aa, Artificial Sequence; identical to SEQ ID NO: 2579
  Synthetic

SEQ ID NO: 4580 - protein, 9 aa, Artificial Sequence
  Synthetic
QQYYSGPRT

SEQ ID NO: 4581 - protein, 118 aa, Artificial Sequence; identical to SEQ ID NO: 2581
  Synthetic

SEQ ID NO: 4582 - protein, 11 aa, Artificial Sequence
  Synthetic
TRGYSGYDFDY

SEQ ID NO: 4583 - protein, 108 aa, Artificial Sequence; identical to SEQ ID NO: 2583
  Synthetic
  misc_feature (9)..(10): Xaa can be any naturally occurring amino acid

SEQ ID NO: 4584 - protein, 10 aa, Artificial Sequence
  Synthetic
QQTSNTLSIT

SEQ ID NO: 4585 - protein, 117 aa, Artificial Sequence; identical to SEQ ID NO: 2393
  Synthetic

SEQ ID NO: 4586 - protein, 11 aa, Artificial Sequence
  Synthetic
VRDFGEFYFDY

SEQ ID NO: 4587 - protein, 107 aa, Artificial Sequence; identical to SEQ ID NO: 2587
  Synthetic
  misc_feature (9)..(10): Xaa can be any naturally occurring amino acid

SEQ ID NO: 4588 - protein, 9 aa, Artificial Sequence
  Synthetic
QQYYSGPRT

SEQ ID NO: 4589 - protein, 121 aa, Artificial Sequence; identical to SEQ ID NO: 2589
  Synthetic

SEQ ID NO: 4590 - protein, 14 aa, Artificial Sequence
  Synthetic
ARDQLTLMVSFPDY

SEQ ID NO: 4591 - protein, 108 aa, Artificial Sequence; identical to SEQ ID NO: 2591
  Synthetic

SEQ ID NO: 4592 - protein, 10 aa, Artificial Sequence
  Synthetic
QQSYSTPPWT

SEQ ID NO: 4593 - protein, 120 aa, Artificial Sequence; identical to SEQ ID NO: 2593
  Synthetic

SEQ ID NO: 4594 - protein, 12 aa, Artificial Sequence
  Synthetic
ARDGMVAGVFEI

SEQ ID NO: 4595 - protein, 107 aa, Artificial Sequence; identical to SEQ ID NO: 2595
  Synthetic

SEQ ID NO: 4596 - protein, 10 aa, Artificial Sequence
  Synthetic
QQRSHWPPFT

SEQ ID NO: 4597 - protein, 130 aa, Artificial Sequence; identical to SEQ ID NO: 2597
  Synthetic

SEQ ID NO: 4598 - protein, 23 aa, Artificial Sequence
  Synthetic
ARPEGCGSRTSCTPGAYYYGMDV

SEQ ID NO: 4599 - protein, 109 aa, Artificial Sequence; identical to SEQ ID NO: 118
  Synthetic

SEQ ID NO: 4600 - protein, 11 aa, Artificial Sequence
  Synthetic
QQRNSWPPEYS

SEQ ID NO: 4601 - protein, 117 aa, Artificial Sequence; identical to SEQ ID NO: 2601
  Synthetic

SEQ ID NO: 4602 - protein, 11 aa, Artificial Sequence
  Synthetic
AGWSRPSTFDY

SEQ ID NO: 4603 - protein, 106 aa, Artificial Sequence; identical to SEQ ID NO: 2603
  Synthetic

SEQ ID NO: 4604 - protein, 9 aa, Artificial Sequence
  Synthetic
QQYDNLPPT

SEQ ID NO: 4605 - protein, 121 aa, Artificial Sequence; identical to SEQ ID NO: 2605
  Synthetic

SEQ ID NO: 4606 - protein, 14 aa, Artificial Sequence
  Synthetic
VKDSITMIVVVLDY

SEQ ID NO: 4607 - protein, 107 aa, Artificial Sequence; identical to SEQ ID NO: 2607
  Synthetic
  misc_feature (10)..(10): Xaa can be any naturally occurring amino acid

SEQ ID NO: 4608 - protein, 9 aa, Artificial Sequence
  Synthetic
QQSYSSPPT

SEQ ID NO: 4609 - protein, 122 aa, Artificial Sequence; identical to SEQ ID NO: 2609
  Synthetic

SEQ ID NO: 4610 - protein, 13 aa, Artificial Sequence
  Synthetic
ARDFGGNANYFAY

SEQ ID NO: 4611 - protein, 106 aa, Artificial Sequence; identical to SEQ ID NO: 2611
  Synthetic

SEQ ID NO: 4612 - protein, 9 aa, Artificial Sequence
  Synthetic
QQYDNLPLT

SEQ ID NO: 4613 - protein, 116 aa, Artificial Sequence; identical to SEQ ID NO: 2613
  Synthetic

SEQ ID NO: 4614 - protein, 9 aa, Artificial Sequence
  Synthetic
ARANGILDF

SEQ ID NO: 4615 - protein, 106 aa, Artificial Sequence; identical to SEQ ID NO: 2615
  Synthetic
  misc_feature (9)..(10): Xaa can be any naturally occurring amino acid

SEQ ID NO: 4616 - protein, 9 aa, Artificial Sequence
  Synthetic
QHYYSSPRT

SEQ ID NO: 4617 - protein, 119 aa, Artificial Sequence; identical to SEQ ID NO: 2617
  Synthetic

SEQ ID NO: 4618 - protein, 11 aa, Artificial Sequence
  Synthetic
AREGDNSVFDI

SEQ ID NO: 4619 - protein, 108 aa, Artificial Sequence; identical to SEQ ID NO: 2619
  Synthetic

SEQ ID NO: 4620 - protein, 10 aa, Artificial Sequence
  Synthetic
QQRYNWPPLT

SEQ ID NO: 4621 - protein, 123 aa, Artificial Sequence; identical to SEQ ID NO: 2621
  Synthetic

SEQ ID NO: 4622 - protein, 16 aa, Artificial Sequence
  Synthetic
AKNIRGYSIDWYYFDY

SEQ ID NO: 4623 - protein, 107 aa, Artificial Sequence; identical to SEQ ID NO: 2623
  Synthetic

SEQ ID NO: 4624 - protein, 9 aa, Artificial Sequence
  Synthetic
QQYHSLPVT

SEQ ID NO: 4625 - protein, 122 aa, Artificial Sequence; identical to SEQ ID NO: 2625
  Synthetic

SEQ ID NO: 4626 - protein, 15 aa, Artificial Sequence
  Synthetic
ARNKGELDQSDASDM

SEQ ID NO: 4627 - protein, 107 aa, Artificial Sequence; identical to SEQ ID NO: 2627
  Synthetic

SEQ ID NO: 4628 - protein, 9 aa, Artificial Sequence
  Synthetic
QHYNSLMCT

SEQ ID NO: 4629 - protein, 122 aa, Artificial Sequence; identical to SEQ ID NO: 2629
  Synthetic

SEQ ID NO: 4630 - protein, 15 aa, Artificial Sequence
  Synthetic
VKDKEETTMVTIFDY

SEQ ID NO: 4631 - protein, 107 aa, Artificial Sequence; identical to SEQ ID NO: 2631
  Synthetic

SEQ ID NO: 4632 - protein, 9 aa, Artificial Sequence
  Synthetic
QQSYSSHLT

SEQ ID NO: 4633 - protein, 124 aa, Artificial Sequence; identical to SEQ ID NO: 2633
  Synthetic

SEQ ID NO: 4634 - protein, 17 aa, Artificial Sequence
  Synthetic
ALYSGYDEPLVLWPFDY

SEQ ID NO: 4635 - protein, 114 aa, Artificial Sequence; identical to SEQ ID NO: 2635
  Synthetic
  misc_feature (15)..(15): Xaa can be any naturally occurring amino acid

SEQ ID NO: 4636 - protein, 10 aa, Artificial Sequence
  Synthetic
QQYYSTPPLT

SEQ ID NO: 4637 - protein, 115 aa, Artificial Sequence; identical to SEQ ID NO: 2237
  Synthetic

SEQ ID NO: 4638 - protein, 9 aa, Artificial Sequence
  Synthetic
ARIANYMDV

SEQ ID NO: 4639 - protein, 108 aa, Artificial Sequence; identical to SEQ ID NO: 2239
  Synthetic

SEQ ID NO: 4640 - protein, 10 aa, Artificial Sequence
  Synthetic
QQYNNWPPLT

SEQ ID NO: 4641 - protein, 123 aa, Artificial Sequence; identical to SEQ ID NO: 2641
  Synthetic

SEQ ID NO: 4642 - protein, 16 aa, Artificial Sequence
  Synthetic
ARGLSGSYSDDEGVEE

SEQ ID NO: 4643 - protein, 107 aa, Artificial Sequence; identical to SEQ ID NO: 2643
  Synthetic

SEQ ID NO: 4644 - protein, 9 aa, Artificial Sequence
  Synthetic
LQRSYWPLT

SEQ ID NO: 4645 - protein, 118 aa, Artificial Sequence; identical to SEQ ID NO: 2645
  Synthetic

SEQ ID NO: 4646 - protein, 11 aa, Artificial Sequence
  Synthetic
AINTQWDLVPR

SEQ ID NO: 4647 - protein, 108 aa, Artificial Sequence; identical to SEQ ID NO: 2647
  Synthetic

SEQ ID NO: 4648 - protein, 9 aa, Artificial Sequence
  Synthetic
QQYGFSLYS

SEQ ID NO: 4649 - protein, 124 aa, Artificial Sequence; identical to SEQ ID NO: 2649
  Synthetic

SEQ ID NO: 4650 - protein, 16 aa, Artificial Sequence
  Synthetic
ARGWASSTWCYGCMDV

SEQ ID NO: 4651 - protein, 112 aa, Artificial Sequence; identical to SEQ ID NO: 2651
  Synthetic

SEQ ID NO: 4652 - protein, 9 aa, Artificial Sequence
  Synthetic
TQATQFPHT

SEQ ID NO: 4653 - protein, 128 aa, Artificial Sequence; identical to SEQ ID NO: 2653
  Synthetic

SEQ ID NO: 4654 - protein, 20 aa, Artificial Sequence
  Synthetic
ATELYYYDRSGFQHWDGFAI

SEQ ID NO: 4655 - protein, 108 aa, Artificial Sequence; identical to SEQ ID NO: 2655
  Synthetic

SEQ ID NO: 4656 - protein, 10 aa, Artificial Sequence
  Synthetic
QQYNNWPRRT

SEQ ID NO: 4657 - protein, 118 aa, Artificial Sequence; identical to SEQ ID NO: 2657
  Synthetic

SEQ ID NO: 4658 - protein, 12 aa, Artificial Sequence
  Synthetic
ARDVGDYYGMDV

SEQ ID NO: 4659 - protein, 108 aa, Artificial Sequence; identical to SEQ ID NO: 2659
  Synthetic

SEQ ID NO: 4660 - protein, 10 aa, Artificial Sequence
  Synthetic
QLLNSYPQLT

SEQ ID NO: 4661 - protein, 117 aa, Artificial Sequence; identical to SEQ ID NO: 2661
  Synthetic

SEQ ID NO: 4662 - protein, 11 aa, Artificial Sequence
  Synthetic
ARDLIALGVDV

SEQ ID NO: 4663 - protein, 108 aa, Artificial Sequence; identical to SEQ ID NO: 2663
  Synthetic

SEQ ID NO: 4664 - protein, 10 aa, Artificial Sequence
  Synthetic
QLLNSYPMCS

SEQ ID NO: 4665 - protein, 116 aa, Artificial Sequence; identical to SEQ ID NO: 2665
  Synthetic

SEQ ID NO: 4666 - protein, 10 aa, Artificial Sequence
  Synthetic
ARDVARYSDI

SEQ ID NO: 4667 - protein, 107 aa, Artificial Sequence; identical to SEQ ID NO: 2667
  Synthetic

SEQ ID NO: 4668 - protein, 9 aa, Artificial Sequence
  Synthetic
QQCDNLPCS

SEQ ID NO: 4669 - protein, 129 aa, Artificial Sequence; identical to SEQ ID NO: 2669
  Synthetic

SEQ ID NO: 4670 - protein, 22 aa, Artificial Sequence
  Synthetic
ARIAPFHDSGSAYYPTQNYMDV

SEQ ID NO: 4671 - protein, 108 aa, Artificial Sequence; identical to SEQ ID NO: 2671
  Synthetic

SEQ ID NO: 4672 - protein, 9 aa, Artificial Sequence
  Synthetic
QQYGNLILT

SEQ ID NO: 4673 - protein, 122 aa, Artificial Sequence; identical to SEQ ID NO: 2673
  Synthetic

SEQ ID NO: 4674 - protein, 13 aa, Artificial Sequence
  Synthetic
STTNDYGDYSPAY

SEQ ID NO: 4675 - protein, 107 aa, Artificial Sequence; identical to SEQ ID NO: 2675
  Synthetic

SEQ ID NO: 4676 - protein, 9 aa, Artificial Sequence
  Synthetic
QQSYTTPLT

SEQ ID NO: 4677 - protein, 129 aa, Artificial Sequence; identical to SEQ ID NO: 2677
  Synthetic

SEQ ID NO: 4678 - protein, 22 aa, Artificial Sequence
  Synthetic
TRAPRGYYNSSGHYYIVDYFDY

SEQ ID NO: 4679 - protein, 107 aa, Artificial Sequence; identical to SEQ ID NO: 2679
  Synthetic

SEQ ID NO: 4680 - protein, 9 aa, Artificial Sequence
  Synthetic
QQYQSYPLT

SEQ ID NO: 4681 - protein, 128 aa, Artificial Sequence; identical to SEQ ID NO: 2681
  Synthetic

SEQ ID NO: 4682 - protein, 22 aa, Artificial Sequence
  Synthetic
ARGTQSSGWYNGGLKYYYYMDV

SEQ ID NO: 4683 - protein, 108 aa, Artificial Sequence; identical to SEQ ID NO: 2683
  Synthetic

SEQ ID NO: 4684 - protein, 10 aa, Artificial Sequence
  Synthetic
QQSYSTPFGT

SEQ ID NO: 4685 - protein, 120 aa, Artificial Sequence; identical to SEQ ID NO: 2685
  Synthetic

SEQ ID NO: 4686 - protein, 12 aa, Artificial Sequence
  Synthetic
ARESGVGGTFDY

SEQ ID NO: 4687 - protein, 109 aa, Artificial Sequence; identical to SEQ ID NO: 2687
  Synthetic

SEQ ID NO: 4688 - protein, 10 aa, Artificial Sequence
  Synthetic
QQYGSSPSYT

SEQ ID NO: 4689 - protein, 123 aa, Artificial Sequence; identical to SEQ ID NO: 2689
  Synthetic

SEQ ID NO: 4690 - protein, 16 aa, Artificial Sequence
  Synthetic
ARDHDFIPTITRGFDL

SEQ ID NO: 4691 - protein, 108 aa, Artificial Sequence; identical to SEQ ID NO: 2691
  Synthetic

SEQ ID NO: 4692 - protein, 9 aa, Artificial Sequence
  Synthetic
QQSGISLLT

SEQ ID NO: 4693 - protein, 118 aa, Artificial Sequence; identical to SEQ ID NO: 2693
  Synthetic

SEQ ID NO: 4694 - protein, 12 aa, Artificial Sequence
  Synthetic
ARETGTYGTFDH

SEQ ID NO: 4695 - protein, 107 aa, Artificial Sequence; identical to SEQ ID NO: 96
  Synthetic

SEQ ID NO: 4696 - protein, 9 aa, Artificial Sequence
  Synthetic
QQYAFSVWT

SEQ ID NO: 4697 - protein, 115 aa, Artificial Sequence; identical to SEQ ID NO: 2237
  Synthetic

SEQ ID NO: 4698 - protein, 9 aa, Artificial Sequence
  Synthetic
ARIANYMDV

SEQ ID NO: 4699 - protein, 108 aa, Artificial Sequence; identical to SEQ ID NO: 2239
  Synthetic

SEQ ID NO: 4700 - protein, 10 aa, Artificial Sequence
  Synthetic
QQYNNWPPLT

SEQ ID NO: 4701 - protein, 125 aa, Artificial Sequence; identical to SEQ ID NO: 2701
  Synthetic

SEQ ID NO: 4702 - protein, 17 aa, Artificial Sequence
  Synthetic
ARVSTTVTTYLVGGFDI

SEQ ID NO: 4703 - protein, 107 aa, Artificial Sequence; identical to SEQ ID NO: 2703
  Synthetic

SEQ ID NO: 4704 - protein, 9 aa, Artificial Sequence
  Synthetic
QQYDNLPWT

SEQ ID NO: 4705 - protein, 121 aa, Artificial Sequence; identical to SEQ ID NO: 2705
  Synthetic
  misc_feature (45)..(45): Xaa can be any naturally occurring amino acid
  misc_feature (59)..(59): Xaa can be any naturally occurring amino acid

SEQ ID NO: 4706 - protein, 14 aa, Artificial Sequence
  Synthetic
AKDVVSWPHYYFDF

SEQ ID NO: 4707 - protein, 107 aa, Artificial Sequence; identical to SEQ ID NO: 2707
  Synthetic

SEQ ID NO: 4708 - protein, 9 aa, Artificial Sequence
  Synthetic
QQYDNLLIT

SEQ ID NO: 4709 - protein, 122 aa, Artificial Sequence; identical to SEQ ID NO: 2709
  Synthetic

SEQ ID NO: 4710 - protein, 15 aa, Artificial Sequence
  Synthetic
ARRGYNYGNYYYLDV

SEQ ID NO: 4711 - protein, 108 aa, Artificial Sequence; identical to SEQ ID NO: 2711
  Synthetic

SEQ ID NO: 4712 - protein, 10 aa, Artificial Sequence
  Synthetic
QQSFSTLALT

SEQ ID NO: 4713 - protein, 121 aa, Artificial Sequence; identical to SEQ ID NO: 2713
  Synthetic

SEQ ID NO: 4714 - protein, 15 aa, Artificial Sequence
  Synthetic
GVCAGDCYAASVFDY

SEQ ID NO: 4715 - protein, 107 aa, Artificial Sequence; identical to SEQ ID NO: 2715
  Synthetic

SEQ ID NO: 4716 - protein, 9 aa, Artificial Sequence
  Synthetic
QQYDNLPLT

SEQ ID NO: 4717 - protein, 122 aa, Artificial Sequence; identical to SEQ ID NO: 101
  Synthetic

SEQ ID NO: 4718 - protein, 15 aa, Artificial Sequence
  Synthetic
ARGDCLSSSCYSLDY

SEQ ID NO: 4719 - protein, 107 aa, Artificial Sequence; identical to SEQ ID NO: 2719
  Synthetic

SEQ ID NO: 4720 - protein, 9 aa, Artificial Sequence
  Synthetic
QQTYRSPLT

SEQ ID NO: 4721 - protein, 130 aa, Artificial Sequence; identical to SEQ ID NO: 2721
  Synthetic

SEQ ID NO: 4722 - protein, 23 aa, Artificial Sequence
  Synthetic
ARDMEVDYYDRSGHYHVFHAFDI

SEQ ID NO: 4723 - protein, 113 aa, Artificial Sequence; identical to SEQ ID NO: 2723
  Synthetic

SEQ ID NO: 4724 - protein, 9 aa, Artificial Sequence
  Synthetic
QQYYSIPRS

SEQ ID NO: 4725 - protein, 121 aa, Artificial Sequence; identical to SEQ ID NO: 2725
  Synthetic

SEQ ID NO: 4726 - protein, 13 aa, Artificial Sequence
  Synthetic
ARGVGFGELGFDP

SEQ ID NO: 4727 - protein, 108 aa, Artificial Sequence; identical to SEQ ID NO: 2727
  Synthetic

SEQ ID NO: 4728 - protein, 10 aa, Artificial Sequence
  Synthetic
QQLNSYPPIT

SEQ ID NO: 4729 - protein, 119 aa, Artificial Sequence; identical to SEQ ID NO: 2729
  Synthetic

SEQ ID NO: 4730 - protein, 11 aa, Artificial Sequence
  Synthetic
ATFTVAGHFLF

SEQ ID NO: 4731 - protein, 106 aa, Artificial Sequence; identical to SEQ ID NO: 2731
  Synthetic

SEQ ID NO: 4732 - protein, 8 aa, Artificial Sequence
  Synthetic
QHYDDLPS

SEQ ID NO: 4733 - protein, 117 aa, Artificial Sequence; identical to SEQ ID NO: 2733
  Synthetic

SEQ ID NO: 4734 - protein, 11 aa, Artificial Sequence
  Synthetic
ARDLIALGVDV

SEQ ID NO: 4735 - protein, 108 aa, Artificial Sequence; identical to SEQ ID NO: 2735
  Synthetic

SEQ ID NO: 4736 - protein, 10 aa, Artificial Sequence
  Synthetic
QLLDSYPMCS

SEQ ID NO: 4737 - protein, 129 aa, Artificial Sequence; identical to SEQ ID NO: 2737
  Synthetic

SEQ ID NO: 4738 - protein, 22 aa, Artificial Sequence
  Synthetic
VRGENSFDSSGNEQYNNYAMDV

SEQ ID NO: 4739 - protein, 107 aa, Artificial Sequence; identical to SEQ ID NO: 2739
  Synthetic

SEQ ID NO: 4740 - protein, 9 aa, Artificial Sequence
  Synthetic
QQYNSYPPT

SEQ ID NO: 4741 - protein, 121 aa, Artificial Sequence; identical to SEQ ID NO: 2741
  Synthetic

SEQ ID NO: 4742 - protein, 15 aa, Artificial Sequence
  Synthetic
GVCAGDCYSASVFDY

SEQ ID NO: 4743 - protein, 107 aa, Artificial Sequence; identical to SEQ ID NO: 2715
  Synthetic

SEQ ID NO: 4744 - protein, 9 aa, Artificial Sequence
  Synthetic
QQYDNLPLT

SEQ ID NO: 4745 - protein, 127 aa, Artificial Sequence; identical to SEQ ID NO: 2745
  Synthetic

SEQ ID NO: 4746 - protein, 20 aa, Artificial Sequence
  Synthetic
AKAPSPYCGGGDCYSSGFDP

SEQ ID NO: 4747 - protein, 107 aa, Artificial Sequence; identical to SEQ ID NO: 2747
  Synthetic

SEQ ID NO: 4748 - protein, 9 aa, Artificial Sequence
  Synthetic
QQYANLPLT

SEQ ID NO: 4749 - protein, 123 aa, Artificial Sequence; identical to SEQ ID NO: 2749
  Synthetic

SEQ ID NO: 4750 - protein, 16 aa, Artificial Sequence
  Synthetic
ARPGGKGEHYHGPIDY

SEQ ID NO: 4751 - protein, 107 aa, Artificial Sequence; identical to SEQ ID NO: 2751
  Synthetic

SEQ ID NO: 4752 - protein, 9 aa, Artificial Sequence
  Synthetic
QQYNNFPPS

SEQ ID NO: 4753 - protein, 130 aa, Artificial Sequence; identical to SEQ ID NO: 2281
  Synthetic

SEQ ID NO: 4754 - protein, 23 aa, Artificial Sequence
  Synthetic
AREQEANYYDISGYYHWGESLGY

SEQ ID NO: 4755 - protein, 109 aa, Artificial Sequence; identical to SEQ ID NO: 2755
  Synthetic

SEQ ID NO: 4756 - protein, 11 aa, Artificial Sequence
  Synthetic
QKVNSYPPGLT

SEQ ID NO: 4757 - protein, 121 aa, Artificial Sequence; identical to SEQ ID NO: 2757
  Synthetic

SEQ ID NO: 4758 - protein, 13 aa, Artificial Sequence
  Synthetic
ARDYVTGRGAFDI

SEQ ID NO: 4759 - protein, 106 aa, Artificial Sequence; identical to SEQ ID NO: 2759
  Synthetic

SEQ ID NO: 4760 - protein, 9 aa, Artificial Sequence
  Synthetic
QQYDTFPCT

SEQ ID NO: 4761 - protein, 127 aa, Artificial Sequence; identical to SEQ ID NO: 2761
  Synthetic

SEQ ID NO: 4762 - protein, 20 aa, Artificial Sequence
  Synthetic
AKRGYHYDSSAYFSPYYFDY

SEQ ID NO: 4763 - protein, 107 aa, Artificial Sequence; identical to SEQ ID NO: 2763
  Synthetic

SEQ ID NO: 4764 - protein, 9 aa, Artificial Sequence
  Synthetic
QQYDTLPPF

SEQ ID NO: 4765 - protein, 121 aa, Artificial Sequence; identical to SEQ ID NO: 2765
  Synthetic

SEQ ID NO: 4766 - protein, 14 aa, Artificial Sequence
  Synthetic
ARAGVAYGDYVPDY

SEQ ID NO: 4767 - protein, 109 aa, Artificial Sequence; identical to SEQ ID NO: 2767
  Synthetic

SEQ ID NO: 4768 - protein, 10 aa, Artificial Sequence
  Synthetic
QQYGNSPPWT

SEQ ID NO: 4769 - protein, 128 aa, Artificial Sequence; identical to SEQ ID NO: 2769
  Synthetic

SEQ ID NO: 4770 - protein, 21 aa, Artificial Sequence
  Synthetic
ARDLRTYNDFWSGHGPYFFDY

SEQ ID NO: 4771 - protein, 107 aa, Artificial Sequence; identical to SEQ ID NO: 2771
  Synthetic

SEQ ID NO: 4772 - protein, 9 aa, Artificial Sequence
  Synthetic
QQYNHYSYT

SEQ ID NO: 4773 - protein, 127 aa, Artificial Sequence; identical to SEQ ID NO: 2773
  Synthetic

SEQ ID NO: 4774 - protein, 20 aa, Artificial Sequence
  Synthetic
ARAMAPTYNDFYSGPDVFDI

SEQ ID NO: 4775 - protein, 107 aa, Artificial Sequence; identical to SEQ ID NO: 2775
  Synthetic

SEQ ID NO: 4776 - protein, 9 aa, Artificial Sequence
  Synthetic
QQYNSYSVT

SEQ ID NO: 4777 - protein, 116 aa, Artificial Sequence; identical to SEQ ID NO: 2777
  Synthetic

SEQ ID NO: 4778 - protein, 9 aa, Artificial Sequence
  Synthetic
ARVSGMFDY

SEQ ID NO: 4779 - protein, 106 aa, Artificial Sequence; identical to SEQ ID NO: 2779
  Synthetic

SEQ ID NO: 4780 - protein, 8 aa, Artificial Sequence
  Synthetic
QQYYSIRT

SEQ ID NO: 4781 - protein, 132 aa, Artificial Sequence; identical to SEQ ID NO: 2781
  Synthetic

SEQ ID NO: 4782 - protein, 25 aa, Artificial Sequence
  Synthetic
ARDVTPYYYGSGSYYKLGETTHPDY

SEQ ID NO: 4783 - protein, 106 aa, Artificial Sequence; identical to SEQ ID NO: 2783
  Synthetic

SEQ ID NO: 4784 - protein, 9 aa, Artificial Sequence
  Synthetic
QQYNSFPLT

SEQ ID NO: 4785 - protein, 120 aa, Artificial Sequence; identical to SEQ ID NO: 2785
  Synthetic

SEQ ID NO: 4786 - protein, 13 aa, Artificial Sequence
  Synthetic
ARAWIQPHNWFDP

SEQ ID NO: 4787 - protein, 108 aa, Artificial Sequence; identical to SEQ ID NO: 2787
  Synthetic

SEQ ID NO: 4788 - protein, 9 aa, Artificial Sequence
  Synthetic
QQYGSSPRT

SEQ ID NO: 4789 - protein, 120 aa, Artificial Sequence; identical to SEQ ID NO: 2789
  Synthetic

SEQ ID NO: 4790 - protein, 13 aa, Artificial Sequence
  Synthetic
ARDPMIVVVEMDY

SEQ ID NO: 4791 - protein, 112 aa, Artificial Sequence; identical to SEQ ID NO: 2791
  Synthetic

SEQ ID NO: 4792 - protein, 9 aa, Artificial Sequence
  Synthetic
MQGTHWPYT

SEQ ID NO: 4793 - protein, 122 aa, Artificial Sequence; identical to SEQ ID NO: 2793
  Synthetic

SEQ ID NO: 4794 - protein, 15 aa, Artificial Sequence
  Synthetic
VKDRDSSTWYDAFDI

SEQ ID NO: 4795 - protein, 107 aa, Artificial Sequence; identical to SEQ ID NO: 2795
  Synthetic

SEQ ID NO: 4796 - protein, 9 aa, Artificial Sequence
  Synthetic
QQSYSTPWT

SEQ ID NO: 4797 - protein, 118 aa, Artificial Sequence; identical to SEQ ID NO: 2797
  Synthetic

SEQ ID NO: 4798 - protein, 12 aa, Artificial Sequence
  Synthetic
ARESGTYATFDY

SEQ ID NO: 4799 - protein, 108 aa, Artificial Sequence; identical to SEQ ID NO: 2799
  Synthetic

SEQ ID NO: 4800 - protein, 9 aa, Artificial Sequence
  Synthetic
QQYGYTIWT

SEQ ID NO: 4801 - protein, 126 aa, Artificial Sequence; identical to SEQ ID NO: 2801
  Synthetic

SEQ ID NO: 4802 - protein, 19 aa, Artificial Sequence
  Synthetic
ARRNLITADGPFYYYGMDV

SEQ ID NO: 4803 - protein, 107 aa, Artificial Sequence; identical to SEQ ID NO: 2803
  Synthetic

SEQ ID NO: 4804 - protein, 9 aa, Artificial Sequence
  Synthetic
QQFNSYSST

SEQ ID NO: 4805 - protein, 118 aa, Artificial Sequence; identical to SEQ ID NO: 2805
  Synthetic

SEQ ID NO: 4806 - protein, 12 aa, Artificial Sequence
  Synthetic
ARVLPFGDYFDY

SEQ ID NO: 4807 - protein, 111 aa, Artificial Sequence; identical to SEQ ID NO: 2807
  Synthetic
  misc_feature (110)..(110): Xaa can be any naturally occurring amino acid

SEQ ID NO: 4808 - protein, 11 aa, Artificial Sequence
  Synthetic
QSYDINLSAWV

SEQ ID NO: 4809 - protein, 129 aa, Artificial Sequence [sequence omitted]

SEQ ID NO: 4810 - protein, 23 aa, Artificial Sequence
  Synthetic
ARDSSEVRDHPGHPGRSVGAFDI

SEQ ID NO: 4811 - protein, 110 aa, Artificial Sequence; identical to SEQ ID NO: 2811
  Synthetic

SEQ ID NO: 4812 - protein, 10 aa, Artificial Sequence
  Synthetic
CSYAGASTFV

SEQ ID NO: 4813 - protein, 127 aa, Artificial Sequence; identical to SEQ ID NO: 2813
  Synthetic

SEQ ID NO: 4814 - protein, 20 aa, Artificial Sequence
  Synthetic
ARPTAVAAAGNYFYYYGMDV

SEQ ID NO: 4815 - protein, 110 aa, Artificial Sequence; identical to SEQ ID NO: 2815
  Synthetic

SEQ ID NO: 4816 - protein, 10 aa, Artificial Sequence
  Synthetic
SSYRSSSTLV

SEQ ID NO: 4817 - protein, 118 aa, Artificial Sequence; identical to SEQ ID NO: 2817
  Synthetic

SEQ ID NO: 4818 - protein, 12 aa, Artificial Sequence
  Synthetic
ARHSWLRGMADY

SEQ ID NO: 4819 - protein, 110 aa, Artificial Sequence; identical to SEQ ID NO: 2819
  Synthetic

SEQ ID NO: 4820 - protein, 9 aa, Artificial Sequence
  Synthetic
QSYDSSIWV

SEQ ID NO: 4821 - protein, 131 aa, Artificial Sequence; identical to SEQ ID NO: 2821
  Synthetic

SEQ ID NO: 4822 - protein, 25 aa, Artificial Sequence
  Synthetic
AREGEVEGYNDFWSGYSRDRYYFDY

SEQ ID NO: 4823 - protein, 110 aa, Artificial Sequence; identical to SEQ ID NO: 2823
  Synthetic

SEQ ID NO: 4824 - protein, 10 aa, Artificial Sequence
  Synthetic
SSYTSSSTRV

SEQ ID NO: 4825 - protein, 121 aa, Artificial Sequence; identical to SEQ ID NO: 2825
  Synthetic

SEQ ID NO: 4826 - protein, 15 aa, Artificial Sequence
  Synthetic
ARLKQQLVGFGWFDP

SEQ ID NO: 4827 - protein, 110 aa, Artificial Sequence; identical to SEQ ID NO: 2827
  Synthetic

SEQ ID NO: 4828 - protein, 10 aa, Artificial Sequence
  Synthetic
QSYDHSLNWV

SEQ ID NO: 4829 - protein, 127 aa, Artificial Sequence; identical to SEQ ID NO: 2829
  Synthetic

SEQ ID NO: 4830 - protein, 20 aa, Artificial Sequence
  Synthetic
ARVPASYGDDDYYYYYGMDV

SEQ ID NO: 4831 - protein, 108 aa, Artificial Sequence; identical to SEQ ID NO: 2831
  Synthetic

SEQ ID NO: 4832 - protein, 11 aa, Artificial Sequence
  Synthetic
QSADSSGTLWV

SEQ ID NO: 4833 - protein, 122 aa, Artificial Sequence; identical to SEQ ID NO: 2833
  Synthetic

SEQ ID NO: 4834 - protein, 16 aa, Artificial Sequence
  Synthetic
ARHDTIFGVGQYYFDY

SEQ ID NO: 4835 - protein, 110 aa, Artificial Sequence; identical to SEQ ID NO: 2835
  Synthetic

SEQ ID NO: 4836 - protein, 10 aa, Artificial Sequence
  Synthetic
CSYAGSSTWV

SEQ ID NO: 4837 - protein, 124 aa, Artificial Sequence; identical to SEQ ID NO: 2837
  Synthetic

SEQ ID NO: 4838 - protein, 17 aa, Artificial Sequence
  Synthetic
AKDPFPLAVAGTGYFDY

SEQ ID NO: 4839 - protein, 108 aa, Artificial Sequence; identical to SEQ ID NO: 2839
  Synthetic

SEQ ID NO: 4840 - protein, 11 aa, Artificial Sequence
  Synthetic
QVWDSSSDPWV

SEQ ID NO: 4841 - protein, 131 aa, Artificial Sequence; identical to SEQ ID NO: 2841
  Synthetic

SEQ ID NO: 4842 - protein, 24 aa, Artificial Sequence
  Synthetic
ARGGSSRYCSSTSCYSFGVDNFDY

SEQ ID NO: 4843 - protein, 109 aa, Artificial Sequence; identical to SEQ ID NO: 2843
  Synthetic

SEQ ID NO: 4844 - protein, 12 aa, Artificial Sequence
  Synthetic
QVWDSSSDHYYV

SEQ ID NO: 4845 - protein, 120 aa, Artificial Sequence; identical to SEQ ID NO: 2845
  Synthetic

SEQ ID NO: 4846 - protein, 13 aa, Artificial Sequence
  Synthetic
ARLSDRWYSPFDP

SEQ ID NO: 4847 - protein, 110 aa, Artificial Sequence; identical to SEQ ID NO: 2847
  Synthetic

SEQ ID NO: 4848 - protein, 10 aa, Artificial Sequence
  Synthetic
LLSYSGARPV

SEQ ID NO: 4849 - protein, 120 aa, Artificial Sequence; identical to SEQ ID NO: 2845
  Synthetic

SEQ ID NO: 4850 - protein, 13 aa, Artificial Sequence
  Synthetic
ARLSDRWYSPFDP

SEQ ID NO: 4851 - protein, 110 aa, Artificial Sequence; identical to SEQ ID NO: 2847
  Synthetic

SEQ ID NO: 4852 - protein, 10 aa, Artificial Sequence
  Synthetic
LLSYSGARPV

SEQ ID NO: 4853 - protein, 129 aa, Artificial Sequence; identical to SEQ ID NO: 2853
  Synthetic

SEQ ID NO: 4854 - protein, 23 aa, Artificial Sequence
  Synthetic
ARDSSEVRDHPGHPGRSVGAFDI

SEQ ID NO: 4855 - protein, 110 aa, Artificial Sequence; identical to SEQ ID NO: 2811
  Synthetic

SEQ ID NO: 4856 - protein, 10 aa, Artificial Sequence
  Synthetic
CSYAGASTFV

SEQ ID NO: 4857 - protein, 118 aa, Artificial Sequence; identical to SEQ ID NO: 2857
  Synthetic

SEQ ID NO: 4858 - protein, 11 aa, Artificial Sequence
  Synthetic
AREAEWEAFDI

SEQ ID NO: 4859 - protein, 110 aa, Artificial Sequence; identical to SEQ ID NO: 2859
  Synthetic

SEQ ID NO: 4860 - protein, 10 aa, Artificial Sequence
  Synthetic
CSYAGSYTWV

SEQ ID NO: 4861 - protein, 123 aa, Artificial Sequence; identical to SEQ ID NO: 2861
  Synthetic

SEQ ID NO: 4862 - protein, 16 aa, Artificial Sequence
  Synthetic
AKVDGSYYYYYYGMDV

SEQ ID NO: 4863 - protein, 111 aa, Artificial Sequence; identical to SEQ ID NO: 2863
  Synthetic

SEQ ID NO: 4864 - protein, 11 aa, Artificial Sequence
  Synthetic
SSYTSSSTAWV

SEQ ID NO: 4865 - protein, 127 aa, Artificial Sequence; identical to SEQ ID NO: 2865
  Synthetic

SEQ ID NO: 4866 - protein, 17 aa, Artificial Sequence
  Synthetic
ARDILRDTSWPHDAFDI

SEQ ID NO: 4867 - protein, 112 aa, Artificial Sequence; identical to SEQ ID NO: 2867
  Synthetic

SEQ ID NO: 4868 - protein, 12 aa, Artificial Sequence
  Synthetic
SSYTSSSTPFYV

SEQ ID NO: 4869 - protein, 130 aa, Artificial Sequence; identical to SEQ ID NO: 2869
  Synthetic

SEQ ID NO: 4870 - protein, 23 aa, Artificial Sequence
  Synthetic
ARGPLFHRLVYDFWSGYHDGFDM

SEQ ID NO: 4871 - protein, 110 aa, Artificial Sequence; identical to SEQ ID NO: 2871
  Synthetic

SEQ ID NO: 4872 - protein, 10 aa, Artificial Sequence
  Synthetic
NSYTSSSTWV

SEQ ID NO: 4873 - protein, 122 aa, Artificial Sequence; identical to SEQ ID NO: 2873
  Synthetic

SEQ ID NO: 4874 - protein, 15 aa, Artificial Sequence
  Synthetic
ARERGYYGGKTPPFL

SEQ ID NO: 4875 - protein, 111 aa, Artificial Sequence; identical to SEQ ID NO: 78
  Synthetic

SEQ ID NO: 4876 - protein, 10 aa, Artificial Sequence
  Synthetic
QSYDSSNYWV

SEQ ID NO: 4877 - protein, 132 aa, Artificial Sequence; identical to SEQ ID NO: 2877
  Synthetic

SEQ ID NO: 4878 - protein, 25 aa, Artificial Sequence
  Synthetic
AKSGGRHYYDSSGYYRLPLDDAFDI

SEQ ID NO: 4879 - protein, 112 aa, Artificial Sequence; identical to SEQ ID NO: 2879
  Synthetic

SEQ ID NO: 4880 - protein, 12 aa, Artificial Sequence
  Synthetic
QSYDSSLSGSWV

SEQ ID NO: 4881 - protein, 134 aa, Artificial Sequence; identical to SEQ ID NO: 2881
  Synthetic

SEQ ID NO: 4882 - protein, 28 aa, Artificial Sequence
  Synthetic
ARYQLAPGSGSYYNWGGYPRESEYYFDY

SEQ ID NO: 4883 - protein, 110 aa, Artificial Sequence; identical to SEQ ID NO: 2883
  Synthetic

SEQ ID NO: 4884 - protein, 10 aa, Artificial Sequence
  Synthetic
CSYAGSYTWV

SEQ ID NO: 4885 - protein, 121 aa, Artificial Sequence; identical to SEQ ID NO: 2885
  Synthetic

SEQ ID NO: 4886 - protein, 13 aa, Artificial Sequence
  Synthetic
ARVKGWLRGYFDY

SEQ ID NO: 4887 - protein, 110 aa, Artificial Sequence; identical to SEQ ID NO: 98
  Synthetic

SEQ ID NO: 4888 - protein, 10 aa, Artificial Sequence
  Synthetic
QSYDSGSHVV

SEQ ID NO: 4889 - protein, 129 aa, Artificial Sequence [sequence omitted]

SEQ ID NO: 4890 - protein, 23 aa, Artificial Sequence
  Synthetic
ARDSSEVRDHPGHPGRSVGAFDI

SEQ ID NO: 4891 - protein, 110 aa, Artificial Sequence; identical to SEQ ID NO: 2891
  Synthetic

SEQ ID NO: 4892 - protein, 10 aa, Artificial Sequence
  Synthetic
CSYAGASTFV

SEQ ID NO: 4893 - protein, 125 aa, Artificial Sequence; identical to SEQ ID NO: 2893
  Synthetic

SEQ ID NO: 4894 - protein, 18 aa, Artificial Sequence
  Synthetic
ARASTSTTNWNDALSLGC

SEQ ID NO: 4895 - protein, 113 aa, Artificial Sequence; identical to SEQ ID NO: 2895
  Synthetic

SEQ ID NO: 4896 - protein, 13 aa, Artificial Sequence
  Synthetic
QSYDSGLSGSGVV

SEQ ID NO: 4897 - protein, 124 aa, Artificial Sequence; identical to SEQ ID NO: 2897
  Synthetic

SEQ ID NO: 4898 - protein, 17 aa, Artificial Sequence
  Synthetic
ARDRKYSSGWSVVNFDY

SEQ ID NO: 4899 - protein, 110 aa, Artificial Sequence; identical to SEQ ID NO: 2899
  Synthetic

SEQ ID NO: 4900 - protein, 11 aa, Artificial Sequence
  Synthetic
AAWDDSLNGWV

SEQ ID NO: 4901 - protein, 119 aa, Artificial Sequence; identical to SEQ ID NO: 2901
  Synthetic

SEQ ID NO: 4902 - protein, 12 aa, Artificial Sequence
  Synthetic
ARAEWLRGAFDI

SEQ ID NO: 4903 - protein, 111 aa, Artificial Sequence; identical to SEQ ID NO: 2903
  Synthetic

SEQ ID NO: 4904 - protein, 10 aa, Artificial Sequence
  Synthetic
QSYDSTNHWV

SEQ ID NO: 4905 - protein, 131 aa, Artificial Sequence; identical to SEQ ID NO: 2905
  Synthetic

SEQ ID NO: 4906 - protein, 25 aa, Artificial Sequence
  Synthetic
AREGEVEGYYDFWSGYSRDRYYFDY

SEQ ID NO: 4907 - protein, 110 aa, Artificial Sequence; identical to SEQ ID NO: 2907
  Synthetic

SEQ ID NO: 4908 - protein, 10 aa, Artificial Sequence
  Synthetic
SSYTSSTTRV

SEQ ID NO: 4909 - protein, 131 aa, Artificial Sequence; identical to SEQ ID NO: 2909
  Synthetic

SEQ ID NO: 4910 - protein, 25 aa, Artificial Sequence
  Synthetic
AREGEVEGYYDFWSGYSRDRYYFDY

SEQ ID NO: 4911 - protein, 110 aa, Artificial Sequence; identical to SEQ ID NO: 2911
  Synthetic

SEQ ID NO: 4912 - protein, 10 aa, Artificial Sequence
  Synthetic
SSYTSISTRV

SEQ ID NO: 4913 - protein, 122 aa, Artificial Sequence; identical to SEQ ID NO: 2913
  Synthetic

SEQ ID NO: 4914 - protein, 15 aa, Artificial Sequence
  Synthetic
ARGTEYNWNSAHFDP

SEQ ID NO: 4915 - protein, 111 aa, Artificial Sequence; identical to SEQ ID NO: 2915
  Synthetic

SEQ ID NO: 4916 - protein, 11 aa, Artificial Sequence
  Synthetic
SSYTSSSTSWV

SEQ ID NO: 4917 - protein, 129 aa, Artificial Sequence; identical to SEQ ID NO: 2853
  Synthetic

SEQ ID NO: 4918 - protein, 23 aa, Artificial Sequence
  Synthetic
ARDSSEVRDHPGHPGRSVGAFDI

SEQ ID NO: 4919 - protein, 110 aa, Artificial Sequence; identical to SEQ ID NO: 2919
  Synthetic

SEQ ID NO: 4920 - protein, 10 aa, Artificial Sequence
  Synthetic
CSYAGASTFV

SEQ ID NO: 4921 - protein, 115 aa, Artificial Sequence; identical to SEQ ID NO: 2921
  Synthetic

SEQ ID NO: 4922 - protein, 8 aa, Artificial Sequence
  Synthetic
ARERYGDN

SEQ ID NO: 4923 - protein, 109 aa, Artificial Sequence; identical to SEQ ID NO: 2923
  Synthetic

SEQ ID NO: 4924 - protein, 7 aa, Artificial Sequence
  Synthetic
QTWGPWV

SEQ ID NO: 4925 - protein, 127 aa, Artificial Sequence; identical to SEQ ID NO: 2925
  Synthetic

SEQ ID NO: 4926 - protein, 19 aa, Artificial Sequence
  Synthetic
ARFTNPNYYDSSGYYGFDY

SEQ ID NO: 4927 - protein, 110 aa, Artificial Sequence; identical to SEQ ID NO: 2927
  Synthetic

SEQ ID NO: 4928 - protein, 10 aa, Artificial Sequence
  Synthetic
TSYAGSNNWV

SEQ ID NO: 4929 - protein, 131 aa, Artificial Sequence; identical to SEQ ID NO: 2929
  Synthetic

SEQ ID NO: 4930 - protein, 24 aa, Artificial Sequence
  Synthetic
ARTPRVYDPTLPNQWLVGEYYCDY

SEQ ID NO: 4931 - protein, 110 aa, Artificial Sequence; identical to SEQ ID NO: 2931
  Synthetic

SEQ ID NO: 4932 - protein, 10 aa, Artificial Sequence
  Synthetic
CSYAGSYTWV

SEQ ID NO: 4933 - protein, 119 aa, Artificial Sequence; identical to SEQ ID NO: 2933
  Synthetic

SEQ ID NO: 4934 - protein, 12 aa, Artificial Sequence
  Synthetic
ASAFWQRGNFDY

SEQ ID NO: 4935 - protein, 111 aa, Artificial Sequence; identical to SEQ ID NO: 2935
  Synthetic

SEQ ID NO: 4936 - protein, 10 aa, Artificial Sequence
  Synthetic
QSYDSSILWV

SEQ ID NO: 4937 - protein, 120 aa, Artificial Sequence; identical to SEQ ID NO: 2937
  Synthetic

SEQ ID NO: 4938 - protein, 13 aa, Artificial Sequence
  Synthetic
ARPSSSLTSYFDY

SEQ ID NO: 4939 - protein, 109 aa, Artificial Sequence; identical to SEQ ID NO: 2939
  Synthetic

SEQ ID NO: 4940 - protein, 12 aa, Artificial Sequence
  Synthetic
QVWDSSSDRHWV

SEQ ID NO: 4941 - protein, 122 aa, Artificial Sequence; identical to SEQ ID NO: 2941
  Synthetic

SEQ ID NO: 4942 - protein, 15 aa, Artificial Sequence
  Synthetic
ARERGYDGGKTPPFL

SEQ ID NO: 4943 - protein, 111 aa, Artificial Sequence; identical to SEQ ID NO: 78
  Synthetic

SEQ ID NO: 4944 - protein, 10 aa, Artificial Sequence
  Synthetic
QSYDSSNYWV

SEQ ID NO: 4945 - protein, 131 aa, Artificial Sequence; identical to SEQ ID NO: 2945
  Synthetic

SEQ ID NO: 4946 - protein, 25 aa, Artificial Sequence
  Synthetic
AREGDVEGYYDFWSGYSRDRYYFDY

SEQ ID NO: 4947 - protein, 110 aa, Artificial Sequence; identical to SEQ ID NO: 2947
  Synthetic

SEQ ID NO: 4948 - protein, 10 aa, Artificial Sequence
  Synthetic
SSYTSSSTRV

SEQ ID NO: 4949 - protein, 120 aa, Artificial Sequence; identical to SEQ ID NO: 2949
  Synthetic

SEQ ID NO: 4950 - protein, 13 aa, Artificial Sequence
  Synthetic
VRGGTWNYVGGEV

SEQ ID NO: 4951 - protein, 111 aa, Artificial Sequence; identical to SEQ ID NO: 2951
  Synthetic

SEQ ID NO: 4952 - protein, 11 aa, Artificial Sequence
  Synthetic
TSFTSSSDSWI

SEQ ID NO: 4953 - protein, 131 aa, Artificial Sequence; identical to SEQ ID NO: 2953
  Synthetic

SEQ ID NO: 4954 - protein, 25 aa, Artificial Sequence
  Synthetic
AREGEVEGYYDFWSGYSRDRYYFDY

SEQ ID NO: 4955 - protein, 110 aa, Artificial Sequence; identical to SEQ ID NO: 2947
  Synthetic

SEQ ID NO: 4956 - protein, 10 aa, Artificial Sequence
  Synthetic
SSYTSSSTRV

SEQ ID NO: 4957 - protein, 131 aa, Artificial Sequence; identical to SEQ ID NO: 2905
  Synthetic

SEQ ID NO: 4958 - protein, 25 aa, Artificial Sequence
  Synthetic
AREGEVEGYYDFWSGYSRDRYYFDY

SEQ ID NO: 4959 - protein, 110 aa, Artificial Sequence; identical to SEQ ID NO: 2907
  Synthetic

SEQ ID NO: 4960 - protein, 10 aa, Artificial Sequence
  Synthetic
SSYTSSTTRV

SEQ ID NO: 4961 - protein, 129 aa, Artificial Sequence [sequence omitted]

SEQ ID NO: 4962 - protein, 23 aa, Artificial Sequence
  Synthetic
ARDSSEVRDHPGHPGRSVGAFDI

SEQ ID NO: 4963 - protein, 110 aa, Artificial Sequence; identical to SEQ ID NO: 2811
  Synthetic

SEQ ID NO: 4964 - protein, 10 aa, Artificial Sequence
  Synthetic
CSYAGASTFV

SEQ ID NO: 4965 - protein, 122 aa, Artificial Sequence; identical to SEQ ID NO: 2965
  Synthetic

SEQ ID NO: 4966 - protein, 16 aa, Artificial Sequence
  Synthetic
ARVGGAHSGYDGSFDY

SEQ ID NO: 4967 - protein, 110 aa, Artificial Sequence; identical to SEQ ID NO: 2967
  Synthetic

SEQ ID NO: 4968 - protein, 10 aa, Artificial Sequence
  Synthetic
CSYAGSSTWV

SEQ ID NO: 4969 - protein, 123 aa, Artificial Sequence; identical to SEQ ID NO: 103
  Synthetic

SEQ ID NO: 4970 - protein, 17 aa, Artificial Sequence
  Synthetic
ARDLRDQDGYSYGAFDY

SEQ ID NO: 4971 - protein, 110 aa, Artificial Sequence; identical to SEQ ID NO: 104
  Synthetic

SEQ ID NO: 4972 - protein, 10 aa, Artificial Sequence
  Synthetic
SSYTSSSSWV

SEQ ID NO: 4973 - protein, 121 aa, Artificial Sequence; identical to SEQ ID NO: 2973
  Synthetic
  misc_feature (45)..(45): Xaa can be any naturally occurring amino acid
  misc_feature (61)..(61): Xaa can be any naturally occurring amino acid
  misc_feature (72)..(72): Xaa can be any naturally occurring amino acid

SEQ ID NO: 4974 - protein, 12 aa, Artificial Sequence
  Synthetic
TSQVWLRGPGDY

SEQ ID NO: 4975 - protein, 111 aa, Artificial Sequence; identical to SEQ ID NO: 110
  Synthetic

SEQ ID NO: 4976 - protein, 10 aa, Artificial Sequence
  Synthetic
QSYDSSLNWV

SEQ ID NO: 4977 - protein, 122 aa, Artificial Sequence; identical to SEQ ID NO: 2977
  Synthetic

SEQ ID NO: 4978 - protein, 15 aa, Artificial Sequence
  Synthetic
AKDPWELRQGNYFDY

SEQ ID NO: 4979 - protein, 108 aa, Artificial Sequence; identical to SEQ ID NO: 2979
  Synthetic

SEQ ID NO: 4980 - protein, 11 aa, Artificial Sequence
  Synthetic
QVWDSSSDPWV

SEQ ID NO: 4981 - protein, 129 aa, Artificial Sequence; identical to SEQ ID NO: 2981
  Synthetic

SEQ ID NO: 4982 - protein, 23 aa, Artificial Sequence
  Synthetic
ARDSSEVRDHPGHPGRSVGAFDI

SEQ ID NO: 4983 - protein, 110 aa, Artificial Sequence; identical to SEQ ID NO: 2983
  Synthetic

SEQ ID NO: 4984 - protein, 10 aa, Artificial Sequence
  Synthetic
CSYAGTSTFV

SEQ ID NO: 4985 - protein, 120 aa, Artificial Sequence; identical to SEQ ID NO: 2985
  Synthetic

SEQ ID NO: 4986 - protein, 13 aa, Artificial Sequence
  Synthetic
ARQPTLYYYDSRD

SEQ ID NO: 4987 - protein, 110 aa, Artificial Sequence; identical to SEQ ID NO: 2987
  Synthetic

SEQ ID NO: 4988 - protein, 11 aa, Artificial Sequence
  Synthetic
AAWDDSLNGWV

SEQ ID NO: 4989 - protein, 133 aa, Artificial Sequence; identical to SEQ ID NO: 2989
  Synthetic

SEQ ID NO: 4990 - protein, 22 aa, Artificial Sequence
  Synthetic
ARGGWYYDSGGYYLRRTEGFDI

SEQ ID NO: 4991 - protein, 112 aa, Artificial Sequence; identical to SEQ ID NO: 2991
  Synthetic

SEQ ID NO: 4992 - protein, 12 aa, Artificial Sequence
  Synthetic
QSYDSSLSVFYV

SEQ ID NO: 4993 - protein, 131 aa, Artificial Sequence; identical to SEQ ID NO: 71
  Synthetic

SEQ ID NO: 4994 - protein, 25 aa, Artificial Sequence
  Synthetic
AREGDVEGISDSWSGYSRDRYYFDH

SEQ ID NO: 4995 - protein, 110 aa, Artificial Sequence; identical to SEQ ID NO: 72
  Synthetic

SEQ ID NO: 4996 - protein, 10 aa, Artificial Sequence
  Synthetic
SSFTSNNTRV

SEQ ID NO: 4997 - protein, 121 aa, Artificial Sequence; identical to SEQ ID NO: 2997
  Synthetic

SEQ ID NO: 4998 - protein, 13 aa, Artificial Sequence
  Synthetic
ARVKGWLRGYFDH

SEQ ID NO: 4999 - protein, 110 aa, Artificial Sequence; identical to SEQ ID NO: 88
  Synthetic

SEQ ID NO: 5000 - protein, 10 aa, Artificial Sequence
  Synthetic
QSYEIDSHVV

SEQ ID NO: 5001 - protein, 131 aa, Artificial Sequence; identical to SEQ ID NO: 3001
  Synthetic

SEQ ID NO: 5002 - protein, 25 aa, Artificial Sequence
  Synthetic
AREGDVEGYDGFSSGYSRDRYYFDY

SEQ ID NO: 5003 - protein, 109 aa, Artificial Sequence; identical to SEQ ID NO: 3003
  Synthetic

SEQ ID NO: 5004 - protein, 10 aa, Artificial Sequence
  Synthetic
SSFTARNTRV

SEQ ID NO: 5005 - protein, 120 aa, Artificial Sequence; identical to SEQ ID NO: 3005
  Synthetic

SEQ ID NO: 5006 - protein, 12 aa, Artificial Sequence
  Synthetic
ARTTAWPPHFDY

SEQ ID NO: 5007 - protein, 110 aa, Artificial Sequence; identical to SEQ ID NO: 3007
  Synthetic

SEQ ID NO: 5008 - protein, 10 aa, Artificial Sequence
  Synthetic
SSFTTTNTQV

SEQ ID NO: 5009 - protein, 118 aa, Artificial Sequence; identical to SEQ ID NO: 3009
  Synthetic

SEQ ID NO: 5010 - protein, 13 aa, Artificial Sequence
  Synthetic
ARHIELYSGPMDV

SEQ ID NO: 5011 - protein, 110 aa, Artificial Sequence; identical to SEQ ID NO: 3011
  Synthetic

SEQ ID NO: 5012 - protein, 11 aa, Artificial Sequence
  Synthetic
AAWDDSLNGWV

SEQ ID NO: 5013 - protein, 131 aa, Artificial Sequence; identical to SEQ ID NO: 3013
  Synthetic

SEQ ID NO: 5014 - protein, 25 aa, Artificial Sequence
  Synthetic
AREGDVEGYYGFSSGFSRDRYYFDY

SEQ ID NO: 5015 - protein, 109 aa, Artificial Sequence; identical to SEQ ID NO: 3015
  Synthetic

SEQ ID NO: 5016 - protein, 10 aa, Artificial Sequence
  Synthetic
SSFTSTNTRV

SEQ ID NO: 5017 - protein, 129 aa, Artificial Sequence; identical to SEQ ID NO: 3017
  Synthetic

SEQ ID NO: 5018 - protein, 23 aa, Artificial Sequence
  Synthetic
AREGDVEGLDDSGYSRDRYYFDY

SEQ ID NO: 5019 - protein, 110 aa, Artificial Sequence; identical to SEQ ID NO: 3019
  Synthetic

SEQ ID NO: 5020 - protein, 10 aa, Artificial Sequence
  Synthetic
SSFTDKNTRV

SEQ ID NO: 5021 - protein, 123 aa, Artificial Sequence; identical to SEQ ID NO: 3021
  Synthetic
  misc_feature (87)..(87): Xaa can be any naturally occurring amino acid

SEQ ID NO: 5022 - protein, 18 aa, Artificial Sequence
  Synthetic
ARASTSTSQWTDALSMGP

SEQ ID NO: 5023 - protein, 113 aa, Artificial Sequence; identical to SEQ ID NO: 3023
  Synthetic

SEQ ID NO: 5024 - protein, 13 aa, Artificial Sequence
  Synthetic
QSWDSGLYASGVV

SEQ ID NO: 5025 - protein, 125 aa, Artificial Sequence; identical to SEQ ID NO: 3025
  Synthetic

SEQ ID NO: 5026 - protein, 18 aa, Artificial Sequence
  Synthetic
ARATTSTRSWSDALSMNI

SEQ ID NO: 5027 - protein, 113 aa, Artificial Sequence; identical to SEQ ID NO: 3027
  Synthetic

SEQ ID NO: 5028 - protein, 13 aa, Artificial Sequence
  Synthetic
QSWDNGLSGSGVV

SEQ ID NO: 5029 - protein, 131 aa, Artificial Sequence; identical to SEQ ID NO: 3029
  Synthetic

SEQ ID NO: 5030 - protein, 25 aa, Artificial Sequence
  Synthetic
AREGDVDGSYGFWSGYSRDRYYFDY

SEQ ID NO: 5031 - protein, 110 aa, Artificial Sequence; identical to SEQ ID NO: 3031
  Synthetic

SEQ ID NO: 5032 - protein, 10 aa, Artificial Sequence
  Synthetic
SSYTTSTTRV

SEQ ID NO: 5033 - protein, 121 aa, Artificial Sequence; identical to SEQ ID NO: 3033
  Synthetic

SEQ ID NO: 5034 - protein, 16 aa, Artificial Sequence
  Synthetic
ARLGGVFNGFNGSFDY

SEQ ID NO: 5035 - protein, 110 aa, Artificial Sequence; identical to SEQ ID NO: 3035
  Synthetic

SEQ ID NO: 5036 - protein, 10 aa, Artificial Sequence
  Synthetic
CSYAGASTWV

SEQ ID NO: 5037 - protein, 125 aa, Artificial Sequence; identical to SEQ ID NO: 79
  Synthetic

SEQ ID NO: 5038 - protein, 18 aa, Artificial Sequence
  Synthetic
ARASTSTSSWSEALSLGS

SEQ ID NO: 5039 - protein, 113 aa, Artificial Sequence; identical to SEQ ID NO: 80
  Synthetic

SEQ ID NO: 5040 - protein, 13 aa, Artificial Sequence
  Synthetic
QSWDNGLSGSGVV

SEQ ID NO: 5041 - protein, 124 aa, Artificial Sequence; identical to SEQ ID NO: 3041
  Synthetic

SEQ ID NO: 5042 - protein, 17 aa, Artificial Sequence
  Synthetic
AKVGEYCGGDCYRGLDY

SEQ ID NO: 5043 - protein, 110 aa, Artificial Sequence; identical to SEQ ID NO: 3043
  Synthetic
  misc_feature (4)..(4): Xaa can be any naturally occurring amino acid

SEQ ID NO: 5044 - protein, 10 aa, Artificial Sequence
  Synthetic
LLSSADGRPV

SEQ ID NO: 5045 - protein, 124 aa, Artificial Sequence; identical to SEQ ID NO: 3045
  Synthetic

SEQ ID NO: 5046 - protein, 17 aa, Artificial Sequence
  Synthetic
ATCSERRGSYYGCAFDV

SEQ ID NO: 5047 - protein, 111 aa, Artificial Sequence; identical to SEQ ID NO: 3047
  Synthetic
  misc_feature (2)..(2): Xaa can be any naturally occurring amino acid

SEQ ID NO: 5048 - protein, 9 aa, Artificial Sequence
  Synthetic
QTWDTGVWV

SEQ ID NO: 5049 - protein, 131 aa, Artificial Sequence; identical to SEQ ID NO: 73
  Synthetic

SEQ ID NO: 5050 - protein, 25 aa, Artificial Sequence
  Synthetic
AREGDVDGNYGFWSGYSRDRYYFDY

SEQ ID NO: 5051 - protein, 110 aa, Artificial Sequence; identical to SEQ ID NO: 3051
  Synthetic
  misc_feature (2)..(2): Xaa can be any naturally occurring amino acid

SEQ ID NO: 5052 - protein, 10 aa, Artificial Sequence
  Synthetic
CSYTTNTTRV

SEQ ID NO: 5053 - protein, 120 aa, Artificial Sequence; identical to SEQ ID NO: 3053
  Synthetic

SEQ ID NO: 5054 - protein, 13 aa, Artificial Sequence
  Synthetic
ARKQWLIMGDLGY

SEQ ID NO: 5055 - protein, 108 aa, Artificial Sequence; identical to SEQ ID NO: 3055
  Synthetic

SEQ ID NO: 5056 - protein, 8 aa, Artificial Sequence
  Synthetic
QSYDGSIV

SEQ ID NO: 5057 - protein, 129 aa, Artificial Sequence; identical to SEQ ID NO: 3057
  Synthetic

SEQ ID NO: 5058 - protein, 22 aa, Artificial Sequence
  Synthetic
ARRALGDYYDRHGHFHRLGFDY

SEQ ID NO: 5059 - protein, 109 aa, Artificial Sequence; identical to SEQ ID NO: 3059
  Synthetic

SEQ ID NO: 5060 - protein, 12 aa, Artificial Sequence
  Synthetic
QVWDSSSEHAWV

SEQ ID NO: 5061 - protein, 122 aa, Artificial Sequence; identical to SEQ ID NO: 3061
  Synthetic

SEQ ID NO: 5062 - protein, 15 aa, Artificial Sequence
  Synthetic
ARERGYYGGKTPPFL

SEQ ID NO: 5063 - protein, 111 aa, Artificial Sequence; identical to SEQ ID NO: 78
  Synthetic

SEQ ID NO: 5064 - protein, 10 aa, Artificial Sequence
  Synthetic
QSYDSSNYWV

SEQ ID NO: 5065 - protein, 123 aa, Artificial Sequence; identical to SEQ ID NO: 3065
  Synthetic

SEQ ID NO: 5066 - protein, 15 aa, Artificial Sequence
  Synthetic
ARGGGGNPFPGFLSP

SEQ ID NO: 5067 - protein, 110 aa, Artificial Sequence; identical to SEQ ID NO: 3067
  Synthetic

SEQ ID NO: 5068 - protein, 13 aa, Artificial Sequence
  Synthetic
QVWDSTTGHPNWV

SEQ ID NO: 5069 - protein, 125 aa, Artificial Sequence; identical to SEQ ID NO: 3069
  Synthetic

SEQ ID NO: 5070 - protein, 18 aa, Artificial Sequence
  Synthetic
ARGLYGGVKYYFYYAMDV

SEQ ID NO: 5071 - protein, 112 aa, Artificial Sequence; identical to SEQ ID NO: 3071
  Synthetic

SEQ ID NO: 5072 - protein, 12 aa, Artificial Sequence
  Synthetic
QSYDSSLSSSGV

SEQ ID NO: 5073 - protein, 124 aa, Artificial Sequence; identical to SEQ ID NO: 3073
  Synthetic

SEQ ID NO: 5074 - protein, 17 aa, Artificial Sequence
  Synthetic
VREGLGSRSSSTGYFDL

SEQ ID NO: 5075 - protein, 108 aa, Artificial Sequence; identical to SEQ ID NO: 3075
  Synthetic

SEQ ID NO: 5076 - protein, 11 aa, Artificial Sequence
  Synthetic
QVWDFSSPHVV

SEQ ID NO: 5077 - protein, 119 aa, Artificial Sequence; identical to SEQ ID NO: 3077
  Synthetic

SEQ ID NO: 5078 - protein, 13 aa, Artificial Sequence
  Synthetic
ASLYMVTYDVASY

SEQ ID NO: 5079 - protein, 111 aa, Artificial Sequence; identical to SEQ ID NO: 3079
  Synthetic

SEQ ID NO: 5080 - protein, 12 aa, Artificial Sequence
  Synthetic
ATWDSRLNAAWV

SEQ ID NO: 5081 - protein, 121 aa, Artificial Sequence; identical to SEQ ID NO: 111
  Synthetic

SEQ ID NO: 5082 - protein, 12 aa, Artificial Sequence
  Synthetic
TSQLWLRGPGDY

SEQ ID NO: 5083 - protein, 111 aa, Artificial Sequence; identical to SEQ ID NO: 112
  Synthetic

SEQ ID NO: 5084 - protein, 10 aa, Artificial Sequence
  Synthetic
QSYDSGVNWV

SEQ ID NO: 5085 - protein, 121 aa, Artificial Sequence; identical to SEQ ID NO: 3085
  Synthetic

SEQ ID NO: 5086 - protein, 14 aa, Artificial Sequence
  Synthetic
ARLTPDSSGSYYRG

SEQ ID NO: 5087 - protein, 110 aa, Artificial Sequence; identical to SEQ ID NO: 3087
  Synthetic

SEQ ID NO: 5088 - protein, 10 aa, Artificial Sequence
  Synthetic
TSYTNRNTVV

SEQ ID NO: 5089 - protein, 119 aa, Artificial Sequence; identical to SEQ ID NO: 3089
  Synthetic

SEQ ID NO: 5090 - protein, 12 aa, Artificial Sequence
  Synthetic
ARLPMIWVGMDV

SEQ ID NO: 5091 - protein, 110 aa, Artificial Sequence; identical to SEQ ID NO: 3091
  Synthetic

SEQ ID NO: 5092 - protein, 10 aa, Artificial Sequence
  Synthetic
QSSPGSNHGV

SEQ ID NO: 5093 - protein, 130 aa, Artificial Sequence; identical to SEQ ID NO: 3093
  Synthetic

SEQ ID NO: 5094 - protein, 23 aa, Artificial Sequence
  Synthetic
ARGPLFHKVVYESSSGFHDGLDF

SEQ ID NO: 5095 - protein, 109 aa, Artificial Sequence; identical to SEQ ID NO: 3095
  Synthetic

SEQ ID NO: 5096 - protein, 10 aa, Artificial Sequence
  Synthetic
NSYTSNFTWV

SEQ ID NO: 5097 - protein, 129 aa, Artificial Sequence; identical to SEQ ID NO: 3097
  Synthetic

SEQ ID NO: 5098 - protein, 22 aa, Artificial Sequence
  Synthetic
ARRALGDYYDRTGYYHRLGFDS

SEQ ID NO: 5099 - protein, 109 aa, Artificial Sequence; identical to SEQ ID NO: 3099
  Synthetic

SEQ ID NO: 5100 - protein, 12 aa, Artificial Sequence
  Synthetic
QVWDGTGDHLWV

SEQ ID NO: 5101 - protein, 120 aa, Artificial Sequence; identical to SEQ ID NO: 3101
  Synthetic

SEQ ID NO: 5102 - protein, 13 aa, Artificial Sequence
  Synthetic
ARHDYYGSYYFDY

SEQ ID NO: 5103 - protein, 109 aa, Artificial Sequence; identical to SEQ ID NO: 3103
  Synthetic

SEQ ID NO: 5104 - protein, 9 aa, Artificial Sequence
  Synthetic
MLYLGDNMI

SEQ ID NO: 5105 - protein, 120 aa, Artificial Sequence; identical to SEQ ID NO: 3105
  Synthetic

SEQ ID NO: 5106 - protein, 13 aa, Artificial Sequence
  Synthetic
AKARTGWFLGFDY

SEQ ID NO: 5107 - protein, 111 aa, Artificial Sequence; identical to SEQ ID NO: 3107
  Synthetic

SEQ ID NO: 5108 - protein, 10 aa, Artificial Sequence
  Synthetic
QSFASNTPWV

SEQ ID NO: 5109 - protein, 135 aa, Artificial Sequence; identical to SEQ ID NO: 3109
  Synthetic

SEQ ID NO: 5110 - protein, 28 aa, Artificial Sequence
  Synthetic
ARGGYDFVRGSHRLWPSQGAEYFYYMDV

SEQ ID NO: 5111 - protein, 110 aa, Artificial Sequence; identical to SEQ ID NO: 3111
  Synthetic

SEQ ID NO: 5112 - protein, 10 aa, Artificial Sequence
  Synthetic
SSYTNSKTLE

SEQ ID NO: 5113 - protein, 129 aa, Artificial Sequence; identical to SEQ ID NO: 125
  Synthetic

SEQ ID NO: 5114 - protein, 20 aa, Artificial Sequence
  Synthetic
TTDADYSDSSGYYVTYYFEY

SEQ ID NO: 5115 - protein, 111 aa, Artificial Sequence; identical to SEQ ID NO: 3115
  Synthetic
  misc_feature (2)..(2): Xaa can be any naturally occurring amino acid

SEQ ID NO: 5116 - protein, 11 aa, Artificial Sequence
  Synthetic
CSFAGTYTPWV

SEQ ID NO: 5117 - protein, 123 aa, Artificial Sequence; identical to SEQ ID NO: 105
  Synthetic

SEQ ID NO: 5118 - protein, 17 aa, Artificial Sequence
  Synthetic
ARDLRKDDGYSYGAFDY

SEQ ID NO: 5119 - protein, 110 aa, Artificial Sequence; identical to SEQ ID NO: 3119
  Synthetic

SEQ ID NO: 5120 - protein, 10 aa, Artificial Sequence
  Synthetic
TSYTTNRSWV

SEQ ID NO: 5121 - protein, 122 aa, Artificial Sequence; identical to SEQ ID NO: 3121
  Synthetic

SEQ ID NO: 5122 - protein, 16 aa, Artificial Sequence
  Synthetic
ARLGGVYNGYNGSFDY

SEQ ID NO: 5123 - protein, 110 aa, Artificial Sequence; identical to SEQ ID NO: 3123
  Synthetic

SEQ ID NO: 5124 - protein, 10 aa, Artificial Sequence
  Synthetic
CSYAGRSTWV

SEQ ID NO: 5125 - protein, 122 aa, Artificial Sequence; identical to SEQ ID NO: 3125
  Synthetic

SEQ ID NO: 5126 - protein, 15 aa, Artificial Sequence
  Synthetic
AKQGYGYAYPTYFDY

SEQ ID NO: 5127 - protein, 108 aa, Artificial Sequence; identical to SEQ ID NO: 3127
  Synthetic

SEQ ID NO: 5128 - protein, 11 aa, Artificial Sequence
  Synthetic
QVWDSSSDNPV

SEQ ID NO: 5129 - protein, 135 aa, Artificial Sequence; identical to SEQ ID NO: 3129
  Synthetic

SEQ ID NO: 5130 - protein, 28 aa, Artificial Sequence
  Synthetic
ARGGYDFVRGSYRLWPSQGAEYFYYMDV

SEQ ID NO: 5131 - protein, 110 aa, Artificial Sequence; identical to SEQ ID NO: 3131
  Synthetic

SEQ ID NO: 5132 - protein, 10 aa, Artificial Sequence
  Synthetic
SSYTNSKTLE

SEQ ID NO: 5133 - protein, 129 aa, Artificial Sequence; identical to SEQ ID NO: 3133
  Synthetic

SEQ ID NO: 5134 - protein, 22 aa, Artificial Sequence
  Synthetic
SRVGCGGPDCYFWRPLGNGMDV

SEQ ID NO: 5135 - protein, 111 aa, Artificial Sequence; identical to SEQ ID NO: 3135
  Synthetic

SEQ ID NO: 5136 - protein, 11 aa, Artificial Sequence
  Synthetic
LLYFGGGHLGM

SEQ ID NO: 5137 - protein, 126 aa, Artificial Sequence; identical to SEQ ID NO: 3137
  Synthetic

SEQ ID NO: 5138 - protein, 19 aa, Artificial Sequence
  Synthetic
VKDTYYFDSSSHGINWFDP

SEQ ID NO: 5139 - protein, 111 aa, Artificial Sequence; identical to SEQ ID NO: 3139
  Synthetic

SEQ ID NO: 5140 - protein, 11 aa, Artificial Sequence
  Synthetic
QSYDTSLSRYV

SEQ ID NO: 5141 - protein, 131 aa, Artificial Sequence; identical to SEQ ID NO: 3013
  Synthetic

SEQ ID NO: 5142 - protein, 25 aa, Artificial Sequence
  Synthetic
AREGDVEGYYGFSSGFSRDRYYFDY

SEQ ID NO: 5143 - protein, 109 aa, Artificial Sequence; identical to SEQ ID NO: 3143
  Synthetic

SEQ ID NO: 5144 - protein, 10 aa, Artificial Sequence
  Synthetic
SSFTSTNTRV

SEQ ID NO: 5145 - protein, 130 aa, Artificial Sequence; identical to SEQ ID NO: 3145
  Synthetic

SEQ ID NO: 5146 - protein, 23 aa, Artificial Sequence
  Synthetic
ARGPLFHKLVYDSWSGYHDGFDI

SEQ ID NO: 5147 - protein, 110 aa, Artificial Sequence; identical to SEQ ID NO: 3147
  Synthetic

SEQ ID NO: 5148 - protein, 10 aa, Artificial Sequence
  Synthetic
SSYTNASTWV

SEQ ID NO: 5149 - protein, 130 aa, Artificial Sequence; identical to SEQ ID NO: 3149
  Synthetic

SEQ ID NO: 5150 - protein, 23 aa, Artificial Sequence
  Synthetic
ARGPLFHKLVYDSWTGYHDGFDI

SEQ ID NO: 5151 - protein, 110 aa, Artificial Sequence; identical to SEQ ID NO: 3151
  Synthetic

SEQ ID NO: 5152 - protein, 10 aa, Artificial Sequence
  Synthetic
SSSTNSSTWV

SEQ ID NO: 5153 - protein, 122 aa, Artificial Sequence; identical to SEQ ID NO: 3153
  Synthetic

SEQ ID NO: 5154 - protein, 15 aa, Artificial Sequence
  Synthetic
VRGAVVYGTAGWFDP

SEQ ID NO: 5155 - protein, 106 aa, Artificial Sequence; identical to SEQ ID NO: 3155
  Synthetic

SEQ ID NO: 5156 - protein, 10 aa, Artificial Sequence
  Synthetic
QVWDSYSNWV

SEQ ID NO: 5157 - protein, 127 aa, Artificial Sequence; identical to SEQ ID NO: 3157
  Synthetic

SEQ ID NO: 5158 - protein, 20 aa, Artificial Sequence
  Synthetic
ARDPSYCSDERCSRRDWFDP

SEQ ID NO: 5159 - protein, 109 aa, Artificial Sequence; identical to SEQ ID NO: 3159
  Synthetic

SEQ ID NO: 5160 - protein, 12 aa, Artificial Sequence
  Synthetic
QVWDSGSDHFWV

SEQ ID NO: 5161 - protein, 127 aa, Artificial Sequence; identical to SEQ ID NO: 3161
  Synthetic

SEQ ID NO: 5162 - protein, 20 aa, Artificial Sequence
  Synthetic
ARDRLKQPNPGLRMYNWFAP

SEQ ID NO: 5163 - protein, 116 aa, Artificial Sequence; identical to SEQ ID NO: 3163
  Synthetic

SEQ ID NO: 5164 - protein, 13 aa, Artificial Sequence
  Synthetic
GADHGSGSNFVWV

SEQ ID NO: 5165 - protein, 125 aa, Artificial Sequence; identical to SEQ ID NO: 3165
  Synthetic

SEQ ID NO: 5166 - protein, 18 aa, Artificial Sequence
  Synthetic
ARASTSTTSWSDALSLGS

SEQ ID NO: 5167 - protein, 113 aa, Artificial Sequence; identical to SEQ ID NO: 3167
  Synthetic

SEQ ID NO: 5168 - protein, 13 aa, Artificial Sequence
  Synthetic
QSWDNGLSASGVV

SEQ ID NO: 5169 - protein, 124 aa, Artificial Sequence; identical to SEQ ID NO: 3169
  Synthetic

SEQ ID NO: 5170 - protein, 17 aa, Artificial Sequence
  Synthetic
AIDPSAWYPSRSPRLDS

SEQ ID NO: 5171 - protein, 108 aa, Artificial Sequence; identical to SEQ ID NO: 3171
  Synthetic

SEQ ID NO: 5172 - skipped

SEQ ID NO: 5173 - protein, 122 aa, Artificial Sequence; identical to SEQ ID NO: 3173
  Synthetic

SEQ ID NO: 5174 - protein, 15 aa, Artificial Sequence
  Synthetic
ARERGYYGGKTPPFL

SEQ ID NO: 5175 - protein, 111 aa, Artificial Sequence; identical to SEQ ID NO: 78
  Synthetic

SEQ ID NO: 5176 - protein, 10 aa, Artificial Sequence
  Synthetic
QSYDSSNYWV

SEQ ID NO: 5177 - protein, 115 aa, Artificial Sequence; identical to SEQ ID NO: 3177
  Synthetic

SEQ ID NO: 5178 - protein, 8 aa, Artificial Sequence
  Synthetic
VRERYGDN

SEQ ID NO: 5179 - protein, 109 aa, Artificial Sequence; identical to SEQ ID NO: 3179
  Synthetic

SEQ ID NO: 5180 - protein, 7 aa, Artificial Sequence
  Synthetic
QTWGLWV

SEQ ID NO: 5181 - protein, 130 aa, Artificial Sequence; identical to SEQ ID NO: 3181
  Synthetic

SEQ ID NO: 5182 - protein, 23 aa, Artificial Sequence
  Synthetic
AKAVHYGGNSDRRFSEPSAPFDY

SEQ ID NO: 5183 - protein, 111 aa, Artificial Sequence; identical to SEQ ID NO: 3183
  Synthetic

SEQ ID NO: 5184 - protein, 11 aa, Artificial Sequence
  Synthetic
CSYAGSSTPYV

SEQ ID NO: 5185 - protein, 123 aa, Artificial Sequence; identical to SEQ ID NO: 3185
  Synthetic

SEQ ID NO: 5186 - protein, 17 aa, Artificial Sequence
  Synthetic
AIPFTIFGVVPDWCFDF

SEQ ID NO: 5187 - protein, 109 aa, Artificial Sequence; identical to SEQ ID NO: 3187
  Synthetic

SEQ ID NO: 5188 - protein, 9 aa, Artificial Sequence
  Synthetic
CSYAGNFWV

SEQ ID NO: 5189 - protein, 132 aa, Artificial Sequence; identical to SEQ ID NO: 3189
  Synthetic

SEQ ID NO: 5190 - protein, 25 aa, Artificial Sequence
  Synthetic
ARDCGPAQPPLVEADDYFYFYGMDV

SEQ ID NO: 5191 - protein, 108 aa, Artificial Sequence; identical to SEQ ID NO: 3191
  Synthetic

SEQ ID NO: 5192 - protein, 11 aa, Artificial Sequence
  Synthetic
QSADSSGTRRV

SEQ ID NO: 5193 - protein, 124 aa, Artificial Sequence; identical to SEQ ID NO: 3193
  Synthetic

SEQ ID NO: 5194 - protein, 17 aa, Artificial Sequence
  Synthetic
AKDPFPLAVAGTGYFDY

SEQ ID NO: 5195 - protein, 108 aa, Artificial Sequence; identical to SEQ ID NO: 3195
  Synthetic

SEQ ID NO: 5196 - protein, 11 aa, Artificial Sequence
  Synthetic
QVWDSSGDFWV

SEQ ID NO: 5197 - protein, 123 aa, Artificial Sequence; identical to SEQ ID NO: 3197
  Synthetic

SEQ ID NO: 5198 - protein, 16 aa, Artificial Sequence
  Synthetic
AKVGAPYYYYYYGMDV

SEQ ID NO: 5199 - protein, 111 aa, Artificial Sequence; identical to SEQ ID NO: 3199
  Synthetic

SEQ ID NO: 5200 - protein, 11 aa, Artificial Sequence
  Synthetic
SSYISSTTSWV

SEQ ID NO: 5201 - protein, 130 aa, Artificial Sequence; identical to SEQ ID NO: 3201
  Synthetic

SEQ ID NO: 5202 - protein, 23 aa, Artificial Sequence
  Synthetic
ARDFIPEDLIVVDVTGGAYGMDV

SEQ ID NO: 5203 - protein, 110 aa, Artificial Sequence; identical to SEQ ID NO: 3203
  Synthetic

SEQ ID NO: 5204 - protein, 10 aa, Artificial Sequence
  Synthetic
NSYTGSTTPL

SEQ ID NO: 5205 - protein, 124 aa, Artificial Sequence; identical to SEQ ID NO: 3205
  Synthetic

SEQ ID NO: 5206 - protein, 17 aa, Artificial Sequence
  Synthetic
ARDHSSSSFVYYYYMDV

SEQ ID NO: 5207 - protein, 109 aa, Artificial Sequence; identical to SEQ ID NO: 3207
  Synthetic

SEQ ID NO: 5208 - protein, 10 aa, Artificial Sequence
  Synthetic
CSYAGPYPYV

SEQ ID NO: 5209 - protein, 131 aa, Artificial Sequence; identical to SEQ ID NO: 3209
  Synthetic

SEQ ID NO: 5210 - protein, 25 aa, Artificial Sequence
  Synthetic
AREGDVEGYHDSWSGYSRDRYYFDY

SEQ ID NO: 5211 - protein, 110 aa, Artificial Sequence; identical to SEQ ID NO: 3211
  Synthetic

SEQ ID NO: 5212 - protein, 10 aa, Artificial Sequence
  Synthetic
SSYTNNNTRV

SEQ ID NO: 5213 - protein, 131 aa, Artificial Sequence; identical to SEQ ID NO: 3213
  Synthetic

SEQ ID NO: 5214 - protein, 25 aa, Artificial Sequence
  Synthetic
AREGDVEGYYDFWSGYSRDRYYFDY

SEQ ID NO: 5215 - protein, 110 aa, Artificial Sequence; identical to SEQ ID NO: 3215
  Synthetic

SEQ ID NO: 5216 - protein, 10 aa, Artificial Sequence
  Synthetic
NSYTSNNTRV

SEQ ID NO: 5217 - protein, 131 aa, Artificial Sequence; identical to SEQ ID NO: 3217
  Synthetic

SEQ ID NO: 5218 - protein, 25 aa, Artificial Sequence
  Synthetic
AREGDVEGLHDFWSGYSRDRYYFDY

SEQ ID NO: 5219 - protein, 110 aa, Artificial Sequence; identical to SEQ ID NO: 3219
  Synthetic

SEQ ID NO: 5220 - protein, 10 aa, Artificial Sequence
  Synthetic
SSFTGNNTRV

SEQ ID NO: 5221 - protein, 131 aa, Artificial Sequence; identical to SEQ ID NO: 3221
  Synthetic

SEQ ID NO: 5222 - protein, 25 aa, Artificial Sequence
  Synthetic
AREGDVEGYYDFWSGYSRDRYYFDY

SEQ ID NO: 5223 - protein, 110 aa, Artificial Sequence; identical to SEQ ID NO: 3223
  Synthetic

SEQ ID NO: 5224 - protein, 10 aa, Artificial Sequence
  Synthetic
SSYTSSSARV

SEQ ID NO: 5225 - protein, 131 aa, Artificial Sequence; identical to SEQ ID NO: 3225
  Synthetic

SEQ ID NO: 5226 - protein, 25 aa, Artificial Sequence
  Synthetic
AREGDVEGFSDLWSGYSRDRYYFDY

SEQ ID NO: 5227 - protein, 110 aa, Artificial Sequence; identical to SEQ ID NO: 3227
  Synthetic

SEQ ID NO: 5228 - protein, 10 aa, Artificial Sequence
  Synthetic
SSFTSSNTRV

SEQ ID NO: 5229 - protein, 119 aa, Artificial Sequence; identical to SEQ ID NO: 3229
  Synthetic

SEQ ID NO: 5230 - protein, 12 aa, Artificial Sequence
  Synthetic
VRGDMVAGYFDY

SEQ ID NO: 5231 - protein, 109 aa, Artificial Sequence; identical to SEQ ID NO: 3231
  Synthetic

SEQ ID NO: 5232 - protein, 12 aa, Artificial Sequence
  Synthetic
QVWDSSSDHHWV

SEQ ID NO: 5233 - protein, 129 aa, Artificial Sequence; identical to SEQ ID NO: 3233
  Synthetic

SEQ ID NO: 5234 - protein, 23 aa, Artificial Sequence
  Synthetic
ARDSSEVRDHPGHPGRSVGAFDI

SEQ ID NO: 5235 - protein, 110 aa, Artificial Sequence; identical to SEQ ID NO: 3235
  Synthetic

SEQ ID NO: 5236 - protein, 10 aa, Artificial Sequence
  Synthetic
CSYAGSHTFV

SEQ ID NO: 5237 - protein, 120 aa, Artificial Sequence; identical to SEQ ID NO: 3237
  Synthetic

SEQ ID NO: 5238 - protein, 13 aa, Artificial Sequence
  Synthetic
ARDARNFDWYFDL

SEQ ID NO: 5239 - protein, 110 aa, Artificial Sequence; identical to SEQ ID NO: 3239
  Synthetic

SEQ ID NO: 5240 - protein, 13 aa, Artificial Sequence
  Synthetic
QVWDSTSDHRGYV

SEQ ID NO: 5241 - protein, 121 aa, Artificial Sequence; identical to SEQ ID NO: 3241
  Synthetic

SEQ ID NO: 5242 - protein, 13 aa, Artificial Sequence
  Synthetic
AREEQQLAPWFDP

SEQ ID NO: 5243 - protein, 111 aa, Artificial Sequence; identical to SEQ ID NO: 3243
  Synthetic

SEQ ID NO: 5244 - protein, 11 aa, Artificial Sequence
  Synthetic
QSFDSSLSAYV

SEQ ID NO: 5245 - protein, 119 aa, Artificial Sequence; identical to SEQ ID NO: 3245
  Synthetic
  misc_feature (76)..(76): Xaa can be any naturally occurring amino acid

SEQ ID NO: 5246 - protein, 11 aa, Artificial Sequence
  Synthetic
ASSLVPYYFDS

SEQ ID NO: 5247 - protein, 111 aa, Artificial Sequence; identical to SEQ ID NO: 3247
  Synthetic

SEQ ID NO: 5248 - protein, 12 aa, Artificial Sequence
  Synthetic
QSYDNSLSDPYV

SEQ ID NO: 5249 - protein, 118 aa, Artificial Sequence; identical to SEQ ID NO: 3249
  Synthetic

SEQ ID NO: 5250 - protein, 12 aa, Artificial Sequence
  Synthetic
ARVRWLRGETDY

SEQ ID NO: 5251 - protein, 111 aa, Artificial Sequence; identical to SEQ ID NO: 3251
  Synthetic

SEQ ID NO: 5252 - protein, 10 aa, Artificial Sequence
  Synthetic
QSYDSSNQRV

SEQ ID NO: 5253 - protein, 122 aa, Artificial Sequence; identical to SEQ ID NO: 3253
  Synthetic

SEQ ID NO: 5254 - protein, 14 aa, Artificial Sequence
  Synthetic
ARHPAVAGDEYFQH

SEQ ID NO: 5255 - protein, 110 aa, Artificial Sequence; identical to SEQ ID NO: 3255
  Synthetic

SEQ ID NO: 5256 - protein, 13 aa, Artificial Sequence
  Synthetic
QVWDSTTDLPHYV

SEQ ID NO: 5257 - protein, 122 aa, Artificial Sequence; identical to SEQ ID NO: 3257
  Synthetic

SEQ ID NO: 5258 - protein, 14 aa, Artificial Sequence
  Synthetic
ARRRYLDWSSPFEY

SEQ ID NO: 5259 - protein, 108 aa, Artificial Sequence; identical to SEQ ID NO: 3259
  Synthetic

SEQ ID NO: 5260 - protein, 11 aa, Artificial Sequence
  Synthetic
QVWDSSSDLQV

SEQ ID NO: 5261 - protein, 125 aa, Artificial Sequence; identical to SEQ ID NO: 3261
  Synthetic

SEQ ID NO: 5262 - protein, 17 aa, Artificial Sequence
  Synthetic
ARHDLPPYSSGWSYFDN

SEQ ID NO: 5263 - protein, 109 aa, Artificial Sequence; identical to SEQ ID NO: 3263
  Synthetic

SEQ ID NO: 5264 - protein, 10 aa, Artificial Sequence
  Synthetic
GSWDSSLREV

SEQ ID NO: 5265 - protein, 121 aa, Artificial Sequence; identical to SEQ ID NO: 3265
  Synthetic

SEQ ID NO: 5266 - protein, 15 aa, Artificial Sequence
  Synthetic
ARGVVQLNYDYGMDV

SEQ ID NO: 5267 - protein, 109 aa, Artificial Sequence; identical to SEQ ID NO: 3267
  Synthetic

SEQ ID NO: 5268 - protein, 12 aa, Artificial Sequence
  Synthetic
QVWDNGSDHPVL

SEQ ID NO: 5269 - protein, 121 aa, Artificial Sequence; identical to SEQ ID NO: 3269
  Synthetic

SEQ ID NO: 5270 - protein, 15 aa, Artificial Sequence
  Synthetic
ARLKQQLVGFGWFDP

SEQ ID NO: 5271 - protein, 110 aa, Artificial Sequence; identical to SEQ ID NO: 3271
  Synthetic

SEQ ID NO: 5272 - protein, 10 aa, Artificial Sequence
  Synthetic
QSYDHRLHWV

SEQ ID NO: 5273 - protein, 120 aa, Artificial Sequence; identical to SEQ ID NO: 3273
  Synthetic

SEQ ID NO: 5274 - protein, 13 aa, Artificial Sequence
  Synthetic
ARQFCGGHCPFDF

SEQ ID NO: 5275 - protein, 111 aa, Artificial Sequence; identical to SEQ ID NO: 3275
  Synthetic

SEQ ID NO: 5276 - protein, 10 aa, Artificial Sequence
  Synthetic
QSYDSNNLWV

SEQ ID NO: 5277 - protein, 118 aa, Artificial Sequence; identical to SEQ ID NO: 3277
  Synthetic

SEQ ID NO: 5278 - protein, 11 aa, Artificial Sequence
  Synthetic
VRRASSTNFEF

SEQ ID NO: 5279 - protein, 108 aa, Artificial Sequence; identical to SEQ ID NO: 3279
  Synthetic

SEQ ID NO: 5280 - protein, 11 aa, Artificial Sequence
  Synthetic
QVWDSTSDHYV

SEQ ID NO: 5281 - protein, 121 aa, Artificial Sequence; identical to SEQ ID NO: 3281
  Synthetic

SEQ ID NO: 5282 - protein, 14 aa, Artificial Sequence
  Synthetic
ATSIAVSGTYAFDV

SEQ ID NO: 5283 - protein, 111 aa, Artificial Sequence; identical to SEQ ID NO: 3283
  Synthetic

SEQ ID NO: 5284 - protein, 12 aa, Artificial Sequence
  Synthetic
QAYDSGLSGNFV

SEQ ID NO: 5285 - protein, 121 aa, Artificial Sequence; identical to SEQ ID NO: 3285
  Synthetic

SEQ ID NO: 5286 - protein, 14 aa, Artificial Sequence
  Synthetic
ARLLGGTYAADFDY

SEQ ID NO: 5287 - protein, 110 aa, Artificial Sequence; identical to SEQ ID NO: 3287
  Synthetic

SEQ ID NO: 5288 - protein, 10 aa, Artificial Sequence
  Synthetic
GSYAGSHKWV

SEQ ID NO: 5289 - protein, 127 aa, Artificial Sequence; identical to SEQ ID NO: 135
  Synthetic

SEQ ID NO: 5290 - protein, 20 aa, Artificial Sequence
  Synthetic
ARDSEYSSSWYSRGYYGMDV

SEQ ID NO: 5291 - protein, 112 aa, Artificial Sequence; identical to SEQ ID NO: 136
  Synthetic

SEQ ID NO: 5292 - protein, 9 aa, Artificial Sequence
  Synthetic
MQALQTPPT

SEQ ID NO: 5293 - protein, 126 aa, Artificial Sequence; identical to SEQ ID NO: 3293
  Synthetic

SEQ ID NO: 5294 - protein, 17 aa, Artificial Sequence
  Synthetic
TRARSVTMVWYRYYMDV

SEQ ID NO: 5295 - protein, 112 aa, Artificial Sequence; identical to SEQ ID NO: 3295
  Synthetic

SEQ ID NO: 5296 - protein, 9 aa, Artificial Sequence
  Synthetic
MQSIQLPYT

SEQ ID NO: 5297 - protein, 122 aa, Artificial Sequence; identical to SEQ ID NO: 3297
  Synthetic

SEQ ID NO: 5298 - protein, 16 aa, Artificial Sequence
  Synthetic
ARHWMPRDYYYYGMDV

SEQ ID NO: 5299 - protein, 107 aa, Artificial Sequence; identical to SEQ ID NO: 1283
  Synthetic

SEQ ID NO: 5300 - protein, 9 aa, Artificial Sequence
  Synthetic
QQSYSTPRT

SEQ ID NO: 5301 - protein, 118 aa, Artificial Sequence; identical to SEQ ID NO: 3301
  Synthetic

SEQ ID NO: 5302 - protein, 12 aa, Artificial Sequence
  Synthetic
ARDGEGQRETDY

SEQ ID NO: 5303 - protein, 107 aa, Artificial Sequence; identical to SEQ ID NO: 3303
  Synthetic

SEQ ID NO: 5304 - protein, 9 aa, Artificial Sequence
  Synthetic
QQYDNLPRT

SEQ ID NO: 5305 - protein, 120 aa, Artificial Sequence; identical to SEQ ID NO: 3305
  Synthetic

SEQ ID NO: 5306 - protein, 14 aa, Artificial Sequence
  Synthetic
ARRRSFSRPSSIDY

SEQ ID NO: 5307 - protein, 111 aa, Artificial Sequence; identical to SEQ ID NO: 3307
  Synthetic

SEQ ID NO: 5308 - protein, 8 aa, Artificial Sequence
  Synthetic
MQALQTLT

SEQ ID NO: 5309 - protein, 123 aa, Artificial Sequence; identical to SEQ ID NO: 3309
  Synthetic

SEQ ID NO: 5310 - protein, 16 aa, Artificial Sequence
  Synthetic
AANHCSGGSCYDGFDI

SEQ ID NO: 5311 - protein, 108 aa, Artificial Sequence; identical to SEQ ID NO: 3311
  Synthetic

SEQ ID NO: 5312 - protein, 9 aa, Artificial Sequence
  Synthetic
QQYGSSPWM

SEQ ID NO: 5313 - protein, 127 aa, Artificial Sequence; identical to SEQ ID NO: 135
  Synthetic

SEQ ID NO: 5314 - protein, 20 aa, Artificial Sequence
  Synthetic
ARDSEYSSSWYSRGYYGMDV

SEQ ID NO: 5315 - protein, 112 aa, Artificial Sequence; identical to SEQ ID NO: 136
  Synthetic

SEQ ID NO: 5316 - protein, 9 aa, Artificial Sequence
  Synthetic
MQALQTPPT

SEQ ID NO: 5317 - protein, 127 aa, Artificial Sequence; identical to SEQ ID NO: 3317
  Synthetic

SEQ ID NO: 5318 - protein, 21 aa, Artificial Sequence
  Synthetic
AREVVVQSAKDWSHYYYYMDV

SEQ ID NO: 5319 - protein, 107 aa, Artificial Sequence; identical to SEQ ID NO: 3319
  Synthetic

SEQ ID NO: 5320 - protein, 9 aa, Artificial Sequence
  Synthetic
QQRSSWFVT

SEQ ID NO: 5321 - protein, 117 aa, Artificial Sequence; identical to SEQ ID NO: 3321
  Synthetic

SEQ ID NO: 5322 - protein, 11 aa, Artificial Sequence
  Synthetic
ARDLAVYGMDV

SEQ ID NO: 5323 - protein, 108 aa, Artificial Sequence; identical to SEQ ID NO: 3323
  Synthetic

SEQ ID NO: 5324 - protein, 10 aa, Artificial Sequence
  Synthetic
QQLNSYPPVT

SEQ ID NO: 5325 - protein, 120 aa, Artificial Sequence; identical to SEQ ID NO: 1349
  Synthetic

SEQ ID NO: 5326 - protein, 13 aa, Artificial Sequence
  Synthetic
TRDDSSWPHFFDN

SEQ ID NO: 5327 - protein, 108 aa, Artificial Sequence; identical to SEQ ID NO: 3327
  Synthetic

SEQ ID NO: 5328 - protein, 10 aa, Artificial Sequence
  Synthetic
QQSYSSPLWT

SEQ ID NO: 5329 - protein, 121 aa, Artificial Sequence; identical to SEQ ID NO: 3329
  Synthetic

SEQ ID NO: 5330 - protein, 15 aa, Artificial Sequence
  Synthetic
ARAYVSSVSEDYFDY

SEQ ID NO: 5331 - protein, 107 aa, Artificial Sequence; identical to SEQ ID NO: 3331
  Synthetic

SEQ ID NO: 5332 - protein, 9 aa, Artificial Sequence
  Synthetic
QQSYTTPYT

SEQ ID NO: 5333 - protein, 127 aa, Artificial Sequence; identical to SEQ ID NO: 135
  Synthetic

SEQ ID NO: 5334 - protein, 20 aa, Artificial Sequence
  Synthetic
ARDSEYSSSWYSRGYYGMDV

SEQ ID NO: 5335 - protein, 112 aa, Artificial Sequence; identical to SEQ ID NO: 136
  Synthetic

SEQ ID NO: 5336 - protein, 9 aa, Artificial Sequence
  Synthetic
MQALQTPPT

SEQ ID NO: 5337 - protein, 127 aa, Artificial Sequence; identical to SEQ ID NO: 3337
  Synthetic

SEQ ID NO: 5338 - protein, 21 aa, Artificial Sequence
  Synthetic
AREVVVSSPKDWSHYYYYMDV

SEQ ID NO: 5339 - protein, 107 aa, Artificial Sequence; identical to SEQ ID NO: 3339
  Synthetic

SEQ ID NO: 5340 - protein, 9 aa, Artificial Sequence
  Synthetic
QQRSTWFVT

SEQ ID NO: 5341 - protein, 127 aa, Artificial Sequence; identical to SEQ ID NO: 3317
  Synthetic

SEQ ID NO: 5342 - protein, 21 aa, Artificial Sequence
  Synthetic
AREVVVQSAKDWSHYYYYMDV

SEQ ID NO: 5343 - protein, 107 aa, Artificial Sequence; identical to SEQ ID NO: 3319
  Synthetic

SEQ ID NO: 5344 - protein, 9 aa, Artificial Sequence
  Synthetic
QQRSSWFVT

SEQ ID NO: 5345 - protein, 120 aa, Artificial Sequence; identical to SEQ ID NO: 3305
  Synthetic

SEQ ID NO: 5346 - protein, 14 aa, Artificial Sequence
  Synthetic
ARRRSFSRPSSIDY

SEQ ID NO: 5347 - protein, 111 aa, Artificial Sequence; identical to SEQ ID NO: 3307
  Synthetic

SEQ ID NO: 5348 - protein, 8 aa, Artificial Sequence
  Synthetic
MQALQTLT

SEQ ID NO: 5349 - protein, 120 aa, Artificial Sequence; identical to SEQ ID NO: 1349
  Synthetic

SEQ ID NO: 5350 - protein, 13 aa, Artificial Sequence
  Synthetic
TRDDSSWPHFFDN

SEQ ID NO: 5351 - protein, 106 aa, Artificial Sequence; identical to SEQ ID NO: 3351
  Synthetic

SEQ ID NO: 5352 - protein, 8 aa, Artificial Sequence
  Synthetic
QQYDNWPL

SEQ ID NO: 5353 - protein, 120 aa, Artificial Sequence; identical to SEQ ID NO: 3353
  Synthetic

SEQ ID NO: 5354 - protein, 14 aa, Artificial Sequence
  Synthetic
ARGTTFNHYYYMDV

SEQ ID NO: 5355 - protein, 108 aa, Artificial Sequence; identical to SEQ ID NO: 3355
  Synthetic
  misc_feature (20)..(20): Xaa can be any naturally occurring amino acid

SEQ ID NO: 5356 - protein, 10 aa, Artificial Sequence
  Synthetic
QQSYSTPPWT

SEQ ID NO: 5357 - protein, 128 aa, Artificial Sequence; identical to SEQ ID NO: 3357
  Synthetic

SEQ ID NO: 5358 - protein, 19 aa, Artificial Sequence
  Synthetic
TTDVGADSSSAYYYYYMDV

SEQ ID NO: 5359 - protein, 108 aa, Artificial Sequence; identical to SEQ ID NO: 3359
  Synthetic
  misc_feature (9)..(9): Xaa can be any naturally occurring amino acid

SEQ ID NO: 5360 - protein, 9 aa, Artificial Sequence
  Synthetic
QQYGSSPYT

SEQ ID NO: 5361 - protein, 127 aa, Artificial Sequence; identical to SEQ ID NO: 3317
  Synthetic

SEQ ID NO: 5362 - protein, 21 aa, Artificial Sequence
  Synthetic
AREVVVQSAKDWSHYYYYMDV

SEQ ID NO: 5363 - protein, 107 aa, Artificial Sequence; identical to SEQ ID NO: 3319
  Synthetic

SEQ ID NO: 5364 - protein, 9 aa, Artificial Sequence
  Synthetic
QQRSSWFVT

SEQ ID NO: 5365 - protein, 120 aa, Artificial Sequence; identical to SEQ ID NO: 2345
  Synthetic

SEQ ID NO: 5366 - protein, 13 aa, Artificial Sequence
  Synthetic
ARDVASNYAYFDL

SEQ ID NO: 5367 - protein, 106 aa, Artificial Sequence; identical to SEQ ID NO: 3367
  Synthetic

SEQ ID NO: 5368 - protein, 8 aa, Artificial Sequence
  Synthetic
QQYDNWPL

SEQ ID NO: 5369 - protein, 127 aa, Artificial Sequence; identical to SEQ ID NO: 135
  Synthetic

SEQ ID NO: 5370 - protein, 20 aa, Artificial Sequence
  Synthetic
ARDSEYSSSWYSRGYYGMDV

SEQ ID NO: 5371 - protein, 112 aa, Artificial Sequence; identical to SEQ ID NO: 136
  Synthetic

SEQ ID NO: 5372 - protein, 9 aa, Artificial Sequence
  Synthetic
MQALQTPPT

SEQ ID NO: 5373 - protein, 120 aa, Artificial Sequence; identical to SEQ ID NO: 3373
  Synthetic

SEQ ID NO: 5374 - protein, 14 aa, Artificial Sequence
  Synthetic
ARGAKGDSDWYFDL

SEQ ID NO: 5375 - protein, 109 aa, Artificial Sequence; identical to SEQ ID NO: 3375
  Synthetic

SEQ ID NO: 5376 - protein, 11 aa, Artificial Sequence
  Synthetic
QQGDNWPRMYT

SEQ ID NO: 5377 - protein, 127 aa, Artificial Sequence; identical to SEQ ID NO: 3317
  Synthetic

SEQ ID NO: 5378 - protein, 21 aa, Artificial Sequence
  Synthetic
AREVVVQSAKDWSHYYYYMDV

SEQ ID NO: 5379 - protein, 107 aa, Artificial Sequence; identical to SEQ ID NO: 3319
  Synthetic

SEQ ID NO: 5380 - protein, 9 aa, Artificial Sequence
  Synthetic
QQRSSWFVT

SEQ ID NO: 5381 - protein, 117 aa, Artificial Sequence; identical to SEQ ID NO: 3381
  Synthetic

SEQ ID NO: 5382 - protein, 10 aa, Artificial Sequence
  Synthetic
ARSGPDYFDY

SEQ ID NO: 5383 - protein, 107 aa, Artificial Sequence; identical to SEQ ID NO: 3383
  Synthetic

SEQ ID NO: 5384 - protein, 9 aa, Artificial Sequence
  Synthetic
QQYNNWPRT

SEQ ID NO: 5385 - protein, 123 aa, Artificial Sequence; identical to SEQ ID NO: 3385
  Synthetic

SEQ ID NO: 5386 - protein, 16 aa, Artificial Sequence
  Synthetic
AAPYCSGGSCNDAFDI

SEQ ID NO: 5387 - protein, 108 aa, Artificial Sequence; identical to SEQ ID NO: 3387
  Synthetic

SEQ ID NO: 5388 - protein, 9 aa, Artificial Sequence
  Synthetic
QQYGSSPWT

SEQ ID NO: 5389 - protein, 120 aa, Artificial Sequence; identical to SEQ ID NO: 3305
  Synthetic

SEQ ID NO: 5390 - protein, 14 aa, Artificial Sequence
  Synthetic
ARRRSFSRPSSIDY

SEQ ID NO: 5391 - protein, 111 aa, Artificial Sequence; identical to SEQ ID NO: 3391
  Synthetic
  misc_feature (30)..(30): Xaa can be any naturally occurring amino acid

SEQ ID NO: 5392 - protein, 8 aa, Artificial Sequence
  Synthetic
MQALQTLT

SEQ ID NO: 5393 - protein, 127 aa, Artificial Sequence; identical to SEQ ID NO: 135
  Synthetic

SEQ ID NO: 5394 - protein, 20 aa, Artificial Sequence
  Synthetic
ARDSEYSSSWYSRGYYGMDV

SEQ ID NO: 5395 - protein, 110 aa, Artificial Sequence; identical to SEQ ID NO: 3395
  Synthetic

SEQ ID NO: 5396 - protein, 10 aa, Artificial Sequence
  Synthetic
YSYGGNNNAV

SEQ ID NO: 5397 - protein, 130 aa, Artificial Sequence; identical to SEQ ID NO: 3397
  Synthetic

SEQ ID NO: 5398 - protein, 23 aa, Artificial Sequence
  Synthetic
AREYLERYFDGGQRWISYYYMDV

SEQ ID NO: 5399 - protein, 111 aa, Artificial Sequence; identical to SEQ ID NO: 3399
  Synthetic

SEQ ID NO: 5400 - protein, 11 aa, Artificial Sequence
  Synthetic
SSYTPNSTLVV

SEQ ID NO: 5401 - protein, 125 aa, Artificial Sequence; identical to SEQ ID NO: 3401
  Synthetic

SEQ ID NO: 5402 - protein, 19 aa, Artificial Sequence
  Synthetic
AREIPDILEVVAATGSLDD

SEQ ID NO: 5403 - protein, 109 aa, Artificial Sequence; identical to SEQ ID NO: 3403
  Synthetic

SEQ ID NO: 5404 - protein, 10 aa, Artificial Sequence
  Synthetic
SSYAGITNLV

SEQ ID NO: 5405 - protein, 119 aa, Artificial Sequence; identical to SEQ ID NO: 3405
  Synthetic

SEQ ID NO: 5406 - protein, 12 aa, Artificial Sequence
  Synthetic
ARGVAVDWYFDL

SEQ ID NO: 5407 - protein, 112 aa, Artificial Sequence; identical to SEQ ID NO: 3407
  Synthetic

SEQ ID NO: 5408 - protein, 12 aa, Artificial Sequence
  Synthetic
QSYDSSLSALYV

SEQ ID NO: 5409 - protein, 121 aa, Artificial Sequence; identical to SEQ ID NO: 3409
  Synthetic

SEQ ID NO: 5410 - protein, 14 aa, Artificial Sequence
  Synthetic
ARQPESTIWYYFDY

SEQ ID NO: 5411 - protein, 108 aa, Artificial Sequence; identical to SEQ ID NO: 3411
  Synthetic

SEQ ID NO: 5412 - protein, 11 aa, Artificial Sequence
  Synthetic
QSADSSGSYVV

SEQ ID NO: 5413 - protein, 121 aa, Artificial Sequence; identical to SEQ ID NO: 3413
  Synthetic

SEQ ID NO: 5414 - protein, 14 aa, Artificial Sequence
  Synthetic
ARGPIAAAGSYFDY

SEQ ID NO: 5415 - protein, 109 aa, Artificial Sequence; identical to SEQ ID NO: 3415
  Synthetic

SEQ ID NO: 5416 - protein, 12 aa, Artificial Sequence
  Synthetic
QVWDSSSDPHWV

SEQ ID NO: 5417 - protein, 124 aa, Artificial Sequence; identical to SEQ ID NO: 3417
  Synthetic

SEQ ID NO: 5418 - protein, 17 aa, Artificial Sequence
  Synthetic
AKSPMGYCTNGVCYPDS

SEQ ID NO: 5419 - protein, 111 aa, Artificial Sequence; identical to SEQ ID NO: 3419
  Synthetic

SEQ ID NO: 5420 - protein, 10 aa, Artificial Sequence
  Synthetic
QSYDINSRWV

SEQ ID NO: 5421 - protein, 127 aa, Artificial Sequence; identical to SEQ ID NO: 3421
  Synthetic

SEQ ID NO: 5422 - protein, 21 aa, Artificial Sequence
  Synthetic
ARAGFGVVITYGSGTDPLFDY

SEQ ID NO: 5423 - protein, 112 aa, Artificial Sequence; identical to SEQ ID NO: 3423
  Synthetic

SEQ ID NO: 5424 - protein, 12 aa, Artificial Sequence
  Synthetic
QSYDSSLSGSRV

SEQ ID NO: 5425 - protein, 121 aa, Artificial Sequence; identical to SEQ ID NO: 3409
  Synthetic

SEQ ID NO: 5426 - protein, 14 aa, Artificial Sequence
  Synthetic
ARQPESTIWYYFDY

SEQ ID NO: 5427 - protein, 108 aa, Artificial Sequence; identical to SEQ ID NO: 3427
  Synthetic

SEQ ID NO: 5428 - protein, 11 aa, Artificial Sequence
  Synthetic
QSADSSGSYVV

SEQ ID NO: 5429 - protein, 119 aa, Artificial Sequence; identical to SEQ ID NO: 3405
  Synthetic

SEQ ID NO: 5430 - protein, 12 aa, Artificial Sequence
  Synthetic
ARGVAVDWYFDL

SEQ ID NO: 5431 - protein, 112 aa, Artificial Sequence; identical to SEQ ID NO: 3407
  Synthetic

SEQ ID NO: 5432 - protein, 12 aa, Artificial Sequence
  Synthetic
QSYDSSLSALYV

SEQ ID NO: 5433 - protein, 119 aa, Artificial Sequence; identical to SEQ ID NO: 3405
  Synthetic

SEQ ID NO: 5434 - protein, 12 aa, Artificial Sequence
  Synthetic
ARGVAVDWYFDL

SEQ ID NO: 5435 - protein, 112 aa, Artificial Sequence; identical to SEQ ID NO: 3407
  Synthetic

SEQ ID NO: 5436 - protein, 12 aa, Artificial Sequence
  Synthetic
QSYDSSLSALYV

SEQ ID NO: 5437 - protein, 121 aa, Artificial Sequence; identical to SEQ ID NO: 3409
  Synthetic

SEQ ID NO: 5438 - protein, 14 aa, Artificial Sequence
  Synthetic
ARQPESTIWYYFDY

SEQ ID NO: 5439 - protein, 108 aa, Artificial Sequence; identical to SEQ ID NO: 3411
  Synthetic

SEQ ID NO: 5440 - protein, 11 aa, Artificial Sequence
  Synthetic
QSADSSGSYVV

SEQ ID NO: 5441 - protein, 127 aa, Artificial Sequence; identical to SEQ ID NO: 3421
  Synthetic

SEQ ID NO: 5442 - protein, 21 aa, Artificial Sequence
  Synthetic
ARAGFGVVITYGSGTDPLFDY

SEQ ID NO: 5443 - protein, 112 aa, Artificial Sequence; identical to SEQ ID NO: 3443
  Synthetic

SEQ ID NO: 5444 - protein, 12 aa, Artificial Sequence
  Synthetic
QSYDSSLSGSRV

SEQ ID NO: 5445 - protein, 130 aa, Artificial Sequence; identical to SEQ ID NO: 3445
  Synthetic

SEQ ID NO: 5446 - protein, 21 aa, Artificial Sequence
  Synthetic
TTDPHCSSTSCPIFYYYYMDV

SEQ ID NO: 5447 - protein, 108 aa, Artificial Sequence; identical to SEQ ID NO: 3447
  Synthetic

SEQ ID NO: 5448 - protein, 11 aa, Artificial Sequence
  Synthetic
QVWDSSSDQGV

SEQ ID NO: 5449 - protein, 119 aa, Artificial Sequence; identical to SEQ ID NO: 3405
  Synthetic

SEQ ID NO: 5450 - protein, 12 aa, Artificial Sequence
  Synthetic
ARGVAVDWYFDL

SEQ ID NO: 5451 - protein, 112 aa, Artificial Sequence; identical to SEQ ID NO: 3407
  Synthetic

SEQ ID NO: 5452 - protein, 12 aa, Artificial Sequence
  Synthetic
QSYDSSLSALYV

SEQ ID NO: 5453 - protein, 119 aa, Artificial Sequence; identical to SEQ ID NO: 3453
  Synthetic

SEQ ID NO: 5454 - protein, 12 aa, Artificial Sequence
  Synthetic
ARGIAVDWYFDL

SEQ ID NO: 5455 - protein, 111 aa, Artificial Sequence; identical to SEQ ID NO: 3455
  Synthetic

SEQ ID NO: 5456 - protein, 11 aa, Artificial Sequence
  Synthetic
SSYRGSSTPYV

SEQ ID NO: 5457 - protein, 124 aa, Artificial Sequence; identical to SEQ ID NO: 3457
  Synthetic

SEQ ID NO: 5458 - protein, 17 aa, Artificial Sequence
  Synthetic
ARDSGYSGYGSTYYMDV

SEQ ID NO: 5459 - protein, 111 aa, Artificial Sequence; identical to SEQ ID NO: 3459
  Synthetic

SEQ ID NO: 5460 - protein, 11 aa, Artificial Sequence
  Synthetic
QSYDSSLSGSV

SEQ ID NO: 5461 - protein, 119 aa, Artificial Sequence; identical to SEQ ID NO: 3405
  Synthetic

SEQ ID NO: 5462 - protein, 12 aa, Artificial Sequence
  Synthetic
ARGVAVDWYFDL

SEQ ID NO: 5463 - protein, 112 aa, Artificial Sequence; identical to SEQ ID NO: 3407
  Synthetic

SEQ ID NO: 5464 - protein, 12 aa, Artificial Sequence
  Synthetic
QSYDSSLSALYV

SEQ ID NO: 5465 - protein, 119 aa, Artificial Sequence; identical to SEQ ID NO: 3465
  Synthetic

SEQ ID NO: 5466 - protein, 12 aa, Artificial Sequence
  Synthetic
ARGVAVDWYFDL

SEQ ID NO: 5467 - protein, 112 aa, Artificial Sequence; identical to SEQ ID NO: 3407
  Synthetic

SEQ ID NO: 5468 - protein, 12 aa, Artificial Sequence
  Synthetic
QSYDSSLSALYV

SEQ ID NO: 5469 - protein, 119 aa, Artificial Sequence; identical to SEQ ID NO: 3469
  Synthetic

SEQ ID NO: 5470 - protein, 12 aa, Artificial Sequence
  Synthetic
ARGVAVDWYFDL

SEQ ID NO: 5471 - protein, 112 aa, Artificial Sequence; identical to SEQ ID NO: 3471
  Synthetic

SEQ ID NO: 5472 - protein, 12 aa, Artificial Sequence
  Synthetic
QSYDSSLSVLYV

SEQ ID NO: 5473 - protein, 127 aa, Artificial Sequence; identical to SEQ ID NO: 3473
  Synthetic

SEQ ID NO: 5474 - protein, 20 aa, Artificial Sequence
  Synthetic
AREGPFLPSLYSSSRDAFDI

SEQ ID NO: 5475 - protein, 108 aa, Artificial Sequence; identical to SEQ ID NO: 3475
  Synthetic

SEQ ID NO: 5476 - protein, 12 aa, Artificial Sequence
  Synthetic
QVWDSSSDPHYV

SEQ ID NO: 5477 - protein, 130 aa, Artificial Sequence; identical to SEQ ID NO: 3445
  Synthetic

SEQ ID NO: 5478 - protein, 21 aa, Artificial Sequence
  Synthetic
TTDPHCSSTSCPIFYYYYMDV

SEQ ID NO: 5479 - protein, 108 aa, Artificial Sequence; identical to SEQ ID NO: 3447
  Synthetic

SEQ ID NO: 5480 - protein, 11 aa, Artificial Sequence
  Synthetic
QVWDSSSDQGV

SEQ ID NO: 5481 - protein, 119 aa, Artificial Sequence; identical to SEQ ID NO: 3481
  Synthetic

SEQ ID NO: 5482 - protein, 12 aa, Artificial Sequence
  Synthetic
ARGVAVDWYFDL

SEQ ID NO: 5483 - protein, 112 aa, Artificial Sequence; identical to SEQ ID NO: 3483
  Synthetic

SEQ ID NO: 5484 - protein, 12 aa, Artificial Sequence
  Synthetic
QSYDSSLSALYV

SEQ ID NO: 5485 - protein, 119 aa, Artificial Sequence; identical to SEQ ID NO: 3405
  Synthetic

SEQ ID NO: 5486 - protein, 12 aa, Artificial Sequence
  Synthetic
ARGVAVDWYFDL

SEQ ID NO: 5487 - protein, 112 aa, Artificial Sequence; identical to SEQ ID NO: 3487
  Synthetic

SEQ ID NO: 5488 - protein, 12 aa, Artificial Sequence
  Synthetic
QSYDSSLSALYV

SEQ ID NO: 5489 - protein, 121 aa, Artificial Sequence; identical to SEQ ID NO: 3489
  Synthetic

SEQ ID NO: 5490 - protein, 15 aa, Artificial Sequence
  Synthetic
ARHYDILTALSWFDP

SEQ ID NO: 5491 - protein, 111 aa, Artificial Sequence; identical to SEQ ID NO: 3491
  Synthetic

SEQ ID NO: 5492 - protein, 12 aa, Artificial Sequence
  Synthetic
GTWDSSLSAYWV

SEQ ID NO: 5493 - protein, 124 aa, Artificial Sequence; identical to SEQ ID NO: 3417
  Synthetic

SEQ ID NO: 5494 - protein, 17 aa, Artificial Sequence
  Synthetic
AKSPMGYCTNGVCYPDS

SEQ ID NO: 5495 - protein, 111 aa, Artificial Sequence; identical to SEQ ID NO: 3419
  Synthetic

SEQ ID NO: 5496 - protein, 10 aa, Artificial Sequence
  Synthetic
QSYDINSRWV

SEQ ID NO: 5497 - protein, 121 aa, Artificial Sequence; identical to SEQ ID NO: 167
  Synthetic

SEQ ID NO: 5498 - protein, 15 aa, Artificial Sequence
  Synthetic
ARLLSTEWLFNWFDP

SEQ ID NO: 5499 - protein, 107 aa, Artificial Sequence; identical to SEQ ID NO: 3499
  Synthetic

SEQ ID NO: 5500 - protein, 10 aa, Artificial Sequence
  Synthetic
QAWDSSTAYV

SEQ ID NO: 5501 - protein, 121 aa, Artificial Sequence; identical to SEQ ID NO: 1337
  Synthetic

SEQ ID NO: 5502 - protein, 14 aa, Artificial Sequence
  Synthetic
AKDTGSMIVELLGY

SEQ ID NO: 5503 - protein, 109 aa, Artificial Sequence; identical to SEQ ID NO: 3503
  Synthetic

SEQ ID NO: 5504 - protein, 10 aa, Artificial Sequence
  Synthetic
QSYDTSLRVV

SEQ ID NO: 5505 - protein, 117 aa, Artificial Sequence; identical to SEQ ID NO: 3505
  Synthetic

SEQ ID NO: 5506 - protein, 11 aa, Artificial Sequence
  Synthetic
ARDIVVYGMDV

SEQ ID NO: 5507 - protein, 108 aa, Artificial Sequence; identical to SEQ ID NO: 3507
  Synthetic

SEQ ID NO: 5508 - protein, 10 aa, Artificial Sequence
  Synthetic
QQLNSYPPYT

SEQ ID NO: 5509 - protein, 124 aa, Artificial Sequence; identical to SEQ ID NO: 3509
  Synthetic

SEQ ID NO: 5510 - protein, 18 aa, Artificial Sequence
  Synthetic
ARGKDSSGWARYYYYMDV

SEQ ID NO: 5511 - protein, 108 aa, Artificial Sequence; identical to SEQ ID NO: 3511
  Synthetic

SEQ ID NO: 5512 - protein, 10 aa, Artificial Sequence
  Synthetic
QQSYSAPPWT

SEQ ID NO: 5513 - protein, 124 aa, Artificial Sequence; identical to SEQ ID NO: 3513
  Synthetic

SEQ ID NO: 5514 - protein, 18 aa, Artificial Sequence
  Synthetic
ARTEYAWGSYRSYWYFDL

SEQ ID NO: 5515 - protein, 108 aa, Artificial Sequence; identical to SEQ ID NO: 180
  Synthetic

SEQ ID NO: 5516 - protein, 10 aa, Artificial Sequence
  Synthetic
QQSYSAPPWT

SEQ ID NO: 5517 - protein, 127 aa, Artificial Sequence; identical to SEQ ID NO: 137
  Synthetic

SEQ ID NO: 5518 - protein, 20 aa, Artificial Sequence
  Synthetic
ARDSEFSTSWFSRGYHGMDV

SEQ ID NO: 5519 - protein, 112 aa, Artificial Sequence; identical to SEQ ID NO: 138
  Synthetic

SEQ ID NO: 5520 - protein, 9 aa, Artificial Sequence
  Synthetic
MQALQTPPT

SEQ ID NO: 5521 - protein, 122 aa, Artificial Sequence; identical to SEQ ID NO: 3521
  Synthetic

SEQ ID NO: 5522 - protein, 16 aa, Artificial Sequence
  Synthetic
ARGNFDSSGFYSFLDY

SEQ ID NO: 5523 - protein, 107 aa, Artificial Sequence; identical to SEQ ID NO: 3523
  Synthetic

SEQ ID NO: 5524 - protein, 10 aa, Artificial Sequence
  Synthetic
QQSYVTPSWT

SEQ ID NO: 5525 - protein, 123 aa, Artificial Sequence; identical to SEQ ID NO: 3525
  Synthetic

SEQ ID NO: 5526 - protein, 16 aa, Artificial Sequence
  Synthetic
AKAGPPYASPTTLLDY

SEQ ID NO: 5527 - protein, 108 aa, Artificial Sequence; identical to SEQ ID NO: 3527
  Synthetic

SEQ ID NO: 5528 - protein, 10 aa, Artificial Sequence
  Synthetic
QQYDNVPPIT

SEQ ID NO: 5529 - protein, 116 aa, Artificial Sequence; identical to SEQ ID NO: 153
  Synthetic

SEQ ID NO: 5530 - protein, 12 aa, Artificial Sequence
  Synthetic
ARLGGYRYGMDV

SEQ ID NO: 5531 - protein, 106 aa, Artificial Sequence; identical to SEQ ID NO: 154
  Synthetic

SEQ ID NO: 5532 - protein, 9 aa, Artificial Sequence
  Synthetic
LQYDNLPYS

SEQ ID NO: 5533 - protein, 122 aa, Artificial Sequence; identical to SEQ ID NO: 3533
  Synthetic

SEQ ID NO: 5534 - protein, 14 aa, Artificial Sequence
  Synthetic
VAMEGLYSVLFFGH

SEQ ID NO: 5535 - protein, 106 aa, Artificial Sequence; identical to SEQ ID NO: 3535
  Synthetic

SEQ ID NO: 5536 - protein, 9 aa, Artificial Sequence
  Synthetic
QQSYDAPWT

SEQ ID NO: 5537 - protein, 127 aa, Artificial Sequence; identical to SEQ ID NO: 195
  Synthetic

SEQ ID NO: 5538 - protein, 20 aa, Artificial Sequence
  Synthetic
AKVLGSYCSASSCHGQRPDY

SEQ ID NO: 5539 - protein, 108 aa, Artificial Sequence; identical to SEQ ID NO: 196
  Synthetic

SEQ ID NO: 5540 - protein, 10 aa, Artificial Sequence
  Synthetic
QQYDNVPPWT

SEQ ID NO: 5541 - protein, 119 aa, Artificial Sequence; identical to SEQ ID NO: 161
  Synthetic

SEQ ID NO: 5542 - protein, 13 aa, Artificial Sequence
  Synthetic
ARASGVLTTHFDS

SEQ ID NO: 5543 - protein, 108 aa, Artificial Sequence; identical to SEQ ID NO: 162
  Synthetic

SEQ ID NO: 5544 - protein, 10 aa, Artificial Sequence
  Synthetic
QQSYETPPWT

SEQ ID NO: 5545 - protein, 117 aa, Artificial Sequence; identical to SEQ ID NO: 3545
  Synthetic

SEQ ID NO: 5546 - protein, 11 aa, Artificial Sequence
  Synthetic
AREISSGRFDY

SEQ ID NO: 5547 - protein, 108 aa, Artificial Sequence; identical to SEQ ID NO: 3547
  Synthetic

SEQ ID NO: 5548 - protein, 10 aa, Artificial Sequence
  Synthetic
QQYDNVPRHT

SEQ ID NO: 5549 - protein, 117 aa, Artificial Sequence; identical to SEQ ID NO: 3549
  Synthetic

SEQ ID NO: 5550 - protein, 11 aa, Artificial Sequence
  Synthetic
ARGYGDYYFDF

SEQ ID NO: 5551 - protein, 103 aa, Artificial Sequence; identical to SEQ ID NO: 3551
  Synthetic

SEQ ID NO: 5552 - protein, 5 aa, Artificial Sequence
  Synthetic
QHQLT

SEQ ID NO: 5553 - protein, 128 aa, Artificial Sequence; identical to SEQ ID NO: 3553
  Synthetic

SEQ ID NO: 5554 - protein, 22 aa, Artificial Sequence
  Synthetic
ARVVHYSLSVRGRYSYSYYMDV

SEQ ID NO: 5555 - protein, 108 aa, Artificial Sequence; identical to SEQ ID NO: 3555
  Synthetic

SEQ ID NO: 5556 - protein, 10 aa, Artificial Sequence
  Synthetic
QQTYSNPQNT

SEQ ID NO: 5557 - protein, 125 aa, Artificial Sequence; identical to SEQ ID NO: 3557
  Synthetic

SEQ ID NO: 5558 - protein, 16 aa, Artificial Sequence
  Synthetic
ARNDRYIVIVPAEMLY

SEQ ID NO: 5559 - protein, 108 aa, Artificial Sequence; identical to SEQ ID NO: 218
  Synthetic

SEQ ID NO: 5560 - protein, 10 aa, Artificial Sequence
  Synthetic
QQYSNWPPIT

SEQ ID NO: 5561 - protein, 116 aa, Artificial Sequence; identical to SEQ ID NO: 191
  Synthetic

SEQ ID NO: 5562 - protein, 14 aa, Artificial Sequence
  Synthetic
ARGGSSSWLWYFDL

SEQ ID NO: 5563 - protein, 108 aa, Artificial Sequence; identical to SEQ ID NO: 3563
  Synthetic

SEQ ID NO: 5564 - protein, 10 aa, Artificial Sequence
  Synthetic
QQSYSMPPVT

SEQ ID NO: 5565 - protein, 129 aa, Artificial Sequence; identical to SEQ ID NO: 3565
  Synthetic

SEQ ID NO: 5566 - protein, 22 aa, Artificial Sequence
  Synthetic
ARGGRYYYDRSGYLKSDDVFDF

SEQ ID NO: 5567 - protein, 107 aa, Artificial Sequence; identical to SEQ ID NO: 3567
  Synthetic

SEQ ID NO: 5568 - protein, 9 aa, Artificial Sequence
  Synthetic
QQYHSLPLT

SEQ ID NO: 5569 - protein, 128 aa, Artificial Sequence; identical to SEQ ID NO: 3569
  Synthetic

SEQ ID NO: 5570 - protein, 19 aa, Artificial Sequence
  Synthetic
STVDVEAIWELLENDAFDL

SEQ ID NO: 5571 - protein, 108 aa, Artificial Sequence; identical to SEQ ID NO: 3571
  Synthetic

SEQ ID NO: 5572 - protein, 9 aa, Artificial Sequence
  Synthetic
QQCYSSPFT

SEQ ID NO: 5573 - protein, 123 aa, Artificial Sequence; identical to SEQ ID NO: 157
  Synthetic

SEQ ID NO: 5574 - protein, 16 aa, Artificial Sequence
  Synthetic
AKAVPTSCYVFCALDI

SEQ ID NO: 5575 - protein, 108 aa, Artificial Sequence; identical to SEQ ID NO: 3575
  Synthetic

SEQ ID NO: 5576 - protein, 10 aa, Artificial Sequence
  Synthetic
QKYNSGPALT

SEQ ID NO: 5577 - protein, 125 aa, Artificial Sequence; identical to SEQ ID NO: 3577
  Synthetic

SEQ ID NO: 5578 - protein, 16 aa, Artificial Sequence
  Synthetic
TRLRQVQGVPGYYFDY

SEQ ID NO: 5579 - protein, 106 aa, Artificial Sequence; identical to SEQ ID NO: 3579
  Synthetic

SEQ ID NO: 5580 - protein, 8 aa, Artificial Sequence
  Synthetic
QQYNNWFA

SEQ ID NO: 5581 - protein, 124 aa, Artificial Sequence; identical to SEQ ID NO: 3581
  Synthetic

SEQ ID NO: 5582 - protein, 18 aa, Artificial Sequence
  Synthetic
ARGTHTSSSGRFYYYLDV

SEQ ID NO: 5583 - protein, 108 aa, Artificial Sequence; identical to SEQ ID NO: 3583
  Synthetic

SEQ ID NO: 5584 - protein, 10 aa, Artificial Sequence
  Synthetic
QQSYTSPQYT

SEQ ID NO: 5585 - protein, 126 aa, Artificial Sequence; identical to SEQ ID NO: 3585
  Synthetic

SEQ ID NO: 5586 - protein, 19 aa, Artificial Sequence
  Synthetic
VSRTGSSRGTGYFYKYMDV

SEQ ID NO: 5587 - protein, 112 aa, Artificial Sequence; identical to SEQ ID NO: 3587
  Synthetic

SEQ ID NO: 5588 - protein, 9 aa, Artificial Sequence
  Synthetic
MQALQTPPT

SEQ ID NO: 5589 - protein, 125 aa, Artificial Sequence; identical to SEQ ID NO: 165
  Synthetic

SEQ ID NO: 5590 - protein, 17 aa, Artificial Sequence
  Synthetic
AREGVAVGGNGVDGFDM

SEQ ID NO: 5591 - protein, 107 aa, Artificial Sequence; identical to SEQ ID NO: 3591
  Synthetic

SEQ ID NO: 5592 - protein, 9 aa, Artificial Sequence
  Synthetic
QQTYSVPYT

SEQ ID NO: 5593 - protein, 118 aa, Artificial Sequence; identical to SEQ ID NO: 3593
  Synthetic

SEQ ID NO: 5594 - protein, 12 aa, Artificial Sequence
  Synthetic
ARDRSTRGAFDY

SEQ ID NO: 5595 - protein, 107 aa, Artificial Sequence; identical to SEQ ID NO: 3595
  Synthetic

SEQ ID NO: 5596 - protein, 9 aa, Artificial Sequence
  Synthetic
HQSDNLPPT

SEQ ID NO: 5597 - protein, 119 aa, Artificial Sequence; identical to SEQ ID NO: 3597
  Synthetic

SEQ ID NO: 5598 - protein, 13 aa, Artificial Sequence
  Synthetic
ARDTGEGGWYFDL

SEQ ID NO: 5599 - protein, 108 aa, Artificial Sequence; identical to SEQ ID NO: 3599
  Synthetic

SEQ ID NO: 5600 - protein, 10 aa, Artificial Sequence
  Synthetic
QQSYSTPPIT

SEQ ID NO: 5601 - protein, 125 aa, Artificial Sequence; identical to SEQ ID NO: 3601
  Synthetic

SEQ ID NO: 5602 - protein, 18 aa, Artificial Sequence
  Synthetic
VRDGHYDTSGFWNDPFDI

SEQ ID NO: 5603 - protein, 108 aa, Artificial Sequence; identical to SEQ ID NO: 3603
  Synthetic

SEQ ID NO: 5604 - protein, 9 aa, Artificial Sequence
  Synthetic
QQYGGSPLT

SEQ ID NO: 5605 - protein, 129 aa, Artificial Sequence; identical to SEQ ID NO: 3605
  Synthetic

SEQ ID NO: 5606 - protein, 22 aa, Artificial Sequence
  Synthetic
ARVDPPSQWLVPTVPKCDYFDH

SEQ ID NO: 5607 - protein, 105 aa, Artificial Sequence; identical to SEQ ID NO: 3607
  Synthetic

SEQ ID NO: 5608 - protein, 8 aa, Artificial Sequence
  Synthetic
QQYISDPS

SEQ ID NO: 5609 - protein, 118 aa, Artificial Sequence; identical to SEQ ID NO: 3609
  Synthetic

SEQ ID NO: 5610 - protein, 12 aa, Artificial Sequence
  Synthetic
ARDRGEGARFDY

SEQ ID NO: 5611 - protein, 107 aa, Artificial Sequence; identical to SEQ ID NO: 3611
  Synthetic

SEQ ID NO: 5612 - protein, 9 aa, Artificial Sequence
  Synthetic
QQYDNLPLT

SEQ ID NO: 5613 - protein, 127 aa, Artificial Sequence; identical to SEQ ID NO: 193
  Synthetic

SEQ ID NO: 5614 - protein, 21 aa, Artificial Sequence
  Synthetic
VRGDTLVQGVIKAYYYYFMDV

SEQ ID NO: 5615 - protein, 108 aa, Artificial Sequence; identical to SEQ ID NO: 3615
  Synthetic
  misc_feature (9)..(9): Xaa can be any naturally occurring amino acid

SEQ ID NO: 5616 - protein, 10 aa, Artificial Sequence
  Synthetic
QQTYVMPPYT

SEQ ID NO: 5617 - protein, 116 aa, Artificial Sequence; identical to SEQ ID NO: 153
  Synthetic

SEQ ID NO: 5618 - protein, 12 aa, Artificial Sequence
  Synthetic
ARLGGYRYGMDV

SEQ ID NO: 5619 - protein, 106 aa, Artificial Sequence; identical to SEQ ID NO: 154
  Synthetic

SEQ ID NO: 5620 - protein, 9 aa, Artificial Sequence
  Synthetic
LQYDNLPYS

SEQ ID NO: 5621 - protein, 121 aa, Artificial Sequence; identical to SEQ ID NO: 3621
  Synthetic

SEQ ID NO: 5622 - protein, 14 aa, Artificial Sequence
  Synthetic
ARGGIAVGGWWFDP

SEQ ID NO: 5623 - protein, 108 aa, Artificial Sequence; identical to SEQ ID NO: 3623
  Synthetic

SEQ ID NO: 5624 - protein, 10 aa, Artificial Sequence
  Synthetic
QQYNHWPPNT

SEQ ID NO: 5625 - protein, 119 aa, Artificial Sequence; identical to SEQ ID NO: 3625
  Synthetic

SEQ ID NO: 5626 - protein, 13 aa, Artificial Sequence
  Synthetic
VRASGLPTTHFDY

SEQ ID NO: 5627 - protein, 108 aa, Artificial Sequence; identical to SEQ ID NO: 3627
  Synthetic

SEQ ID NO: 5628 - protein, 10 aa, Artificial Sequence
  Synthetic
QQSYETPPWT

SEQ ID NO: 5629 - protein, 120 aa, Artificial Sequence; identical to SEQ ID NO: 183
  Synthetic

SEQ ID NO: 5630 - protein, 14 aa, Artificial Sequence
  Synthetic
ARGDSSGLYTFFDY

SEQ ID NO: 5631 - protein, 107 aa, Artificial Sequence; identical to SEQ ID NO: 184
  Synthetic

SEQ ID NO: 5632 - protein, 10 aa, Artificial Sequence
  Synthetic
QQSYSTLGLT

SEQ ID NO: 5633 - protein, 125 aa, Artificial Sequence; identical to SEQ ID NO: 159
  Synthetic

SEQ ID NO: 5634 - protein, 16 aa, Artificial Sequence
  Synthetic
TRLRQVQGVPGYYFDQ

SEQ ID NO: 5635 - protein, 106 aa, Artificial Sequence; identical to SEQ ID NO: 160
  Synthetic

SEQ ID NO: 5636 - protein, 8 aa, Artificial Sequence
  Synthetic
QEYDNWFA

SEQ ID NO: 5637 - protein, 120 aa, Artificial Sequence; identical to SEQ ID NO: 215
  Synthetic

SEQ ID NO: 5638 - protein, 13 aa, Artificial Sequence
  Synthetic
ARAQTPEFGELLY

SEQ ID NO: 5639 - protein, 108 aa, Artificial Sequence; identical to SEQ ID NO: 216
  Synthetic

SEQ ID NO: 5640 - protein, 10 aa, Artificial Sequence
  Synthetic
QQSYGPPTYS

SEQ ID NO: 5641 - protein, 117 aa, Artificial Sequence; identical to SEQ ID NO: 3641
  Synthetic

SEQ ID NO: 5642 - protein, 11 aa, Artificial Sequence
  Synthetic
ARLRPPYYMDV

SEQ ID NO: 5643 - protein, 108 aa, Artificial Sequence; identical to SEQ ID NO: 3643
  Synthetic

SEQ ID NO: 5644 - protein, 10 aa, Artificial Sequence
  Synthetic
QHLDGYPPVT

SEQ ID NO: 5645 - protein, 128 aa, Artificial Sequence; identical to SEQ ID NO: 171
  Synthetic

SEQ ID NO: 5646 - protein, 19 aa, Artificial Sequence
  Synthetic
TTVDVQGIWELLENDAFDI

SEQ ID NO: 5647 - protein, 108 aa, Artificial Sequence; identical to SEQ ID NO: 172
  Synthetic

SEQ ID NO: 5648 - protein, 9 aa, Artificial Sequence
  Synthetic
QQSDRSPFT

SEQ ID NO: 5649 - protein, 114 aa, Artificial Sequence; identical to SEQ ID NO: 3649
  Synthetic

SEQ ID NO: 5650 - skipped

SEQ ID NO: 5651 - protein, 106 aa, Artificial Sequence; identical to SEQ ID NO: 3651
  Synthetic

SEQ ID NO: 5652 - protein, 8 aa, Artificial Sequence
  Synthetic
QQYNNWFA

SEQ ID NO: 5653 - protein, 123 aa, Artificial Sequence; identical to SEQ ID NO: 157
  Synthetic

SEQ ID NO: 5654 - protein, 16 aa, Artificial Sequence
  Synthetic
AKAVPTSCYVFCALDI

SEQ ID NO: 5655 - protein, 108 aa, Artificial Sequence; identical to SEQ ID NO: 158
  Synthetic

SEQ ID NO: 5656 - protein, 10 aa, Artificial Sequence
  Synthetic
QKYNSGPALT

SEQ ID NO: 5657 - protein, 115 aa, Artificial Sequence; identical to SEQ ID NO: 3657
  Synthetic

SEQ ID NO: 5658 - protein, 9 aa, Artificial Sequence
  Synthetic
TRLPYGDYA

SEQ ID NO: 5659 - protein, 107 aa, Artificial Sequence; identical to SEQ ID NO: 3659
  Synthetic

SEQ ID NO: 5660 - protein, 9 aa, Artificial Sequence
  Synthetic
LQYDNLPCT

SEQ ID NO: 5661 - protein, 117 aa, Artificial Sequence; identical to SEQ ID NO: 173
  Synthetic

SEQ ID NO: 5662 - protein, 11 aa, Artificial Sequence
  Synthetic
ARDLGDSRLDY

SEQ ID NO: 5663 - protein, 109 aa, Artificial Sequence; identical to SEQ ID NO: 174
  Synthetic

SEQ ID NO: 5664 - protein, 11 aa, Artificial Sequence
  Synthetic
QQLDSYPPGYS

SEQ ID NO: 5665 - protein, 117 aa, Artificial Sequence; identical to SEQ ID NO: 3665
  Synthetic

SEQ ID NO: 5666 - protein, 11 aa, Artificial Sequence
  Synthetic
ARDLDYYGMDV

SEQ ID NO: 5667 - protein, 108 aa, Artificial Sequence; identical to SEQ ID NO: 3667
  Synthetic

SEQ ID NO: 5668 - protein, 10 aa, Artificial Sequence
  Synthetic
QLLNSHPRTA

SEQ ID NO: 5669 - protein, 123 aa, Artificial Sequence; identical to SEQ ID NO: 3669
  Synthetic

SEQ ID NO: 5670 - protein, 17 aa, Artificial Sequence
  Synthetic
AKEHQWGAMTGSNWFDP

SEQ ID NO: 5671 - protein, 107 aa, Artificial Sequence; identical to SEQ ID NO: 3671
  Synthetic

SEQ ID NO: 5672 - protein, 9 aa, Artificial Sequence
  Synthetic
QQANSYPLT

SEQ ID NO: 5673 - protein, 132 aa, Artificial Sequence; identical to SEQ ID NO: 3673
  Synthetic

SEQ ID NO: 5674 - protein, 25 aa, Artificial Sequence
  Synthetic
VRMAKTPGIYDFLTTDGPYFFGLDV

SEQ ID NO: 5675 - protein, 110 aa, Artificial Sequence; identical to SEQ ID NO: 3675
  Synthetic

SEQ ID NO: 5676 - protein, 10 aa, Artificial Sequence
  Synthetic
CSYAGGGTLV

SEQ ID NO: 5677 - protein, 124 aa, Artificial Sequence; identical to SEQ ID NO: 185
  Synthetic

SEQ ID NO: 5678 - protein, 17 aa, Artificial Sequence
  Synthetic
ATGKGYSSSSAAYYFDH

SEQ ID NO: 5679 - protein, 112 aa, Artificial Sequence; identical to SEQ ID NO: 3679
  Synthetic

SEQ ID NO: 5680 - protein, 12 aa, Artificial Sequence
  Synthetic
QSYDSSLSGSEV

SEQ ID NO: 5681 - protein, 121 aa, Artificial Sequence; identical to SEQ ID NO: 169
  Synthetic

SEQ ID NO: 5682 - protein, 15 aa, Artificial Sequence
  Synthetic
ARLLSTEWSFNWFDP

SEQ ID NO: 5683 - protein, 107 aa, Artificial Sequence; identical to SEQ ID NO: 3683
  Synthetic

SEQ ID NO: 5684 - protein, 10 aa, Artificial Sequence
  Synthetic
QAWDSSTAYV

SEQ ID NO: 5685 - protein, 118 aa, Artificial Sequence; identical to SEQ ID NO: 3685
  Synthetic

SEQ ID NO: 5686 - protein, 12 aa, Artificial Sequence
  Synthetic
ARLTMSTYYFDF

SEQ ID NO: 5687 - protein, 110 aa, Artificial Sequence; identical to SEQ ID NO: 3687
  Synthetic

SEQ ID NO: 5688 - protein, 13 aa, Artificial Sequence
  Synthetic
QVWESFRDHQDWV

SEQ ID NO: 5689 - protein, 128 aa, Artificial Sequence; identical to SEQ ID NO: 3689
  Synthetic

SEQ ID NO: 5690 - protein, 21 aa, Artificial Sequence
  Synthetic
AREPIEAVPAGIIVNYYYMDV

SEQ ID NO: 5691 - protein, 111 aa, Artificial Sequence; identical to SEQ ID NO: 3691
  Synthetic

SEQ ID NO: 5692 - protein, 11 aa, Artificial Sequence
  Synthetic
SSFTSAFTLVV

SEQ ID NO: 5693 - protein, 118 aa, Artificial Sequence; identical to SEQ ID NO: 3693
  Synthetic

SEQ ID NO: 5694 - protein, 11 aa, Artificial Sequence
  Synthetic
VRRGSSWEIDY

SEQ ID NO: 5695 - protein, 110 aa, Artificial Sequence; identical to SEQ ID NO: 3695
  Synthetic

SEQ ID NO: 5696 - protein, 11 aa, Artificial Sequence
  Synthetic
AAWDDSLDGWV

SEQ ID NO: 5697 - protein, 124 aa, Artificial Sequence; identical to SEQ ID NO: 3697
  Synthetic

SEQ ID NO: 5698 - protein, 17 aa, Artificial Sequence
  Synthetic
VRGVGYSNSGSNWYFDL

SEQ ID NO: 5699 - protein, 111 aa, Artificial Sequence; identical to SEQ ID NO: 3699
  Synthetic

SEQ ID NO: 5700 - protein, 11 aa, Artificial Sequence
  Synthetic
QSYDSSLSGSV

SEQ ID NO: 5701 - protein, 119 aa, Artificial Sequence; identical to SEQ ID NO: 3701
  Synthetic

SEQ ID NO: 5702 - protein, 12 aa, Artificial Sequence
  Synthetic
VRGIAVDWYFDL

SEQ ID NO: 5703 - protein, 111 aa, Artificial Sequence; identical to SEQ ID NO: 3703
  Synthetic

SEQ ID NO: 5704 - protein, 12 aa, Artificial Sequence
  Synthetic
QSSDSSLSGLYV

SEQ ID NO: 5705 - protein, 118 aa, Artificial Sequence; identical to SEQ ID NO: 181
  Synthetic

SEQ ID NO: 5706 - protein, 12 aa, Artificial Sequence
  Synthetic
ARLTMTTYYFDS

SEQ ID NO: 5707 - protein, 110 aa, Artificial Sequence; identical to SEQ ID NO: 3707
  Synthetic

SEQ ID NO: 5708 - protein, 13 aa, Artificial Sequence
  Synthetic
QVWDSFRDHQDWV

SEQ ID NO: 5709 - protein, 124 aa, Artificial Sequence; identical to SEQ ID NO: 155
  Synthetic

SEQ ID NO: 5710 - protein, 17 aa, Artificial Sequence
  Synthetic
ARGVGYSGSGSNWYFDL

SEQ ID NO: 5711 - protein, 110 aa, Artificial Sequence; identical to SEQ ID NO: 3711
  Synthetic

SEQ ID NO: 5712 - protein, 11 aa, Artificial Sequence
  Synthetic
QSYDSSLSDSV

SEQ ID NO: 5713 - protein, 120 aa, Artificial Sequence; identical to SEQ ID NO: 143
  Synthetic

SEQ ID NO: 5714 - protein, 11 aa, Artificial Sequence
  Synthetic
SRAWIPTPHDY

SEQ ID NO: 5715 - protein, 109 aa, Artificial Sequence; identical to SEQ ID NO: 3715
  Synthetic

SEQ ID NO: 5716 - protein, 11 aa, Artificial Sequence
  Synthetic
AAWDDSLKGPV

SEQ ID NO: 5717 - protein, 121 aa, Artificial Sequence; identical to SEQ ID NO: 3717
  Synthetic

SEQ ID NO: 5718 - protein, 14 aa, Artificial Sequence
  Synthetic
ARAKVVPAATHFDF

SEQ ID NO: 5719 - protein, 107 aa, Artificial Sequence; identical to SEQ ID NO: 3719
  Synthetic

SEQ ID NO: 5720 - protein, 11 aa, Artificial Sequence
  Synthetic
HVWDSSGDHVI

SEQ ID NO: 5721 - protein, 126 aa, Artificial Sequence; identical to SEQ ID NO: 175
  Synthetic

SEQ ID NO: 5722 - protein, 17 aa, Artificial Sequence
  Synthetic
TRRAHYSGSGLSSYVDY

SEQ ID NO: 5723 - protein, 109 aa, Artificial Sequence; identical to SEQ ID NO: 3723
  Synthetic

SEQ ID NO: 5724 - protein, 9 aa, Artificial Sequence
  Synthetic
LISYSGAWV

SEQ ID NO: 5725 - protein, 120 aa, Artificial Sequence; identical to SEQ ID NO: 3725
  Synthetic

SEQ ID NO: 5726 - protein, 13 aa, Artificial Sequence
  Synthetic
ARLVSSYYGWFDT

SEQ ID NO: 5727 - protein, 109 aa, Artificial Sequence; identical to SEQ ID NO: 3727
  Synthetic

SEQ ID NO: 5728 - protein, 10 aa, Artificial Sequence
  Synthetic
ATWDDSLSGV

SEQ ID NO: 5729 - protein, 118 aa, Artificial Sequence; identical to SEQ ID NO: 3729
  Synthetic

SEQ ID NO: 5730 - protein, 11 aa, Artificial Sequence
  Synthetic
ARRGSSWEIDH

SEQ ID NO: 5731 - protein, 110 aa, Artificial Sequence; identical to SEQ ID NO: 3731
  Synthetic

SEQ ID NO: 5732 - protein, 11 aa, Artificial Sequence
  Synthetic
AAWDDSLDGWM

SEQ ID NO: 5733 - protein, 121 aa, Artificial Sequence; identical to SEQ ID NO: 147
  Synthetic

SEQ ID NO: 5734 - protein, 15 aa, Artificial Sequence
  Synthetic
ARHYDILTALSWFDP

SEQ ID NO: 5735 - protein, 110 aa, Artificial Sequence; identical to SEQ ID NO: 3735
  Synthetic
  misc_feature (2)..(2): Xaa can be any naturally occurring amino acid

SEQ ID NO: 5736 - protein, 12 aa, Artificial Sequence
  Synthetic
GTWDSSPSACWV

SEQ ID NO: 5737 - protein, 119 aa, Artificial Sequence; identical to SEQ ID NO: 3737
  Synthetic

SEQ ID NO: 5738 - protein, 12 aa, Artificial Sequence
  Synthetic
VRGVAVDWYFDL

SEQ ID NO: 5739 - protein, 112 aa, Artificial Sequence; identical to SEQ ID NO: 3739
  Synthetic

SEQ ID NO: 5740 - protein, 12 aa, Artificial Sequence
  Synthetic
QSFDSSLNVLHV

SEQ ID NO: 5741 - protein, 126 aa, Artificial Sequence; identical to SEQ ID NO: 3741
  Synthetic

SEQ ID NO: 5742 - protein, 17 aa, Artificial Sequence
  Synthetic
TRRAHYSGSGLTSYVDY

SEQ ID NO: 5743 - protein, 109 aa, Artificial Sequence; identical to SEQ ID NO: 3743
  Synthetic

SEQ ID NO: 5744 - protein, 9 aa, Artificial Sequence
  Synthetic
LVSYSGAWV

SEQ ID NO: 5745 - protein, 122 aa, Artificial Sequence; identical to SEQ ID NO: 213
  Synthetic

SEQ ID NO: 5746 - protein, 15 aa, Artificial Sequence
  Synthetic
AKSDHGDYVIGAFDI

SEQ ID NO: 5747 - protein, 110 aa, Artificial Sequence; identical to SEQ ID NO: 3747
  Synthetic

SEQ ID NO: 5748 - protein, 10 aa, Artificial Sequence
  Synthetic
NSYAGSNNWV

SEQ ID NO: 5749 - protein, 122 aa, Artificial Sequence; identical to SEQ ID NO: 187
  Synthetic

SEQ ID NO: 5750 - protein, 16 aa, Artificial Sequence
  Synthetic
AKEGNGYGYQYAGMDV

SEQ ID NO: 5751 - protein, 110 aa, Artificial Sequence; identical to SEQ ID NO: 3751
  Synthetic

SEQ ID NO: 5752 - protein, 10 aa, Artificial Sequence
  Synthetic
CSYTTSTTRV

SEQ ID NO: 5753 - protein, 124 aa, Artificial Sequence; identical to SEQ ID NO: 149
  Synthetic

SEQ ID NO: 5754 - protein, 17 aa, Artificial Sequence
  Synthetic
AKSPINYCANGVCYPDS

SEQ ID NO: 5755 - protein, 111 aa, Artificial Sequence; identical to SEQ ID NO: 3755
  Synthetic

SEQ ID NO: 5756 - protein, 10 aa, Artificial Sequence
  Synthetic
QSFDVNSRWV

SEQ ID NO: 5757 - protein, 119 aa, Artificial Sequence; identical to SEQ ID NO: 3757
  Synthetic

SEQ ID NO: 5758 - protein, 12 aa, Artificial Sequence
  Synthetic
VRGIPVDWYFDL

SEQ ID NO: 5759 - protein, 112 aa, Artificial Sequence; identical to SEQ ID NO: 3759
  Synthetic

SEQ ID NO: 5760 - protein, 12 aa, Artificial Sequence
  Synthetic
QSYDTSLSALYV

SEQ ID NO: 5761 - protein, 127 aa, Artificial Sequence; identical to SEQ ID NO: 3761
  Synthetic

SEQ ID NO: 5762 - protein, 20 aa, Artificial Sequence
  Synthetic
AREGSYVAVTGNLAAEYLQH

SEQ ID NO: 5763 - protein, 111 aa, Artificial Sequence; identical to SEQ ID NO: 3763
  Synthetic
  misc_feature (4)..(4): Xaa can be any naturally occurring amino acid
  misc_feature (11)..(11): Xaa can be any naturally occurring amino acid
  misc_feature (36)..(36): Xaa can be any naturally occurring amino acid
  misc_feature (65)..(65): Xaa can be any naturally occurring amino acid
  misc_feature (86)..(86): Xaa can be any naturally occurring amino acid

SEQ ID NO: 5764 - protein, 11 aa, Artificial Sequence
  Synthetic
QSYDSSLIGVI

SEQ ID NO: 5765 - protein, 127 aa, Artificial Sequence; identical to SEQ ID NO: 139
  Synthetic

SEQ ID NO: 5766 - protein, 21 aa, Artificial Sequence
  Synthetic
ARAGFGFVITSRSGTDPLFDY

SEQ ID NO: 5767 - protein, 112 aa, Artificial Sequence; identical to SEQ ID NO: 3767
  Synthetic

SEQ ID NO: 5768 - protein, 12 aa, Artificial Sequence
  Synthetic
QSYDTSLSGSRV

SEQ ID NO: 5769 - protein, 128 aa, Artificial Sequence; identical to SEQ ID NO: 219
  Synthetic

SEQ ID NO: 5770 - protein, 22 aa, Artificial Sequence
  Synthetic
ARGQRGYYDRSGYYWGWRAFDI

SEQ ID NO: 5771 - protein, 106 aa, Artificial Sequence; identical to SEQ ID NO: 3771
  Synthetic

SEQ ID NO: 5772 - protein, 9 aa, Artificial Sequence
  Synthetic
QVWDNNSDQ

SEQ ID NO: 5773 - protein, 120 aa, Artificial Sequence; identical to SEQ ID NO: 3773
  Synthetic

SEQ ID NO: 5774 - protein, 11 aa, Artificial Sequence
  Synthetic
TRGWIPTPHDY

SEQ ID NO: 5775 - protein, 109 aa, Artificial Sequence; identical to SEQ ID NO: 3775
  Synthetic

SEQ ID NO: 5776 - protein, 11 aa, Artificial Sequence
  Synthetic
AAWDDSLKGPV

SEQ ID NO: 5777 - protein, 123 aa, Artificial Sequence; identical to SEQ ID NO: 3777
  Synthetic

SEQ ID NO: 5778 - protein, 17 aa, Artificial Sequence
  Synthetic
ARGKGYSSSSAAYYFDY

SEQ ID NO: 5779 - protein, 112 aa, Artificial Sequence; identical to SEQ ID NO: 3779
  Synthetic

SEQ ID NO: 5780 - protein, 12 aa, Artificial Sequence
  Synthetic
QSYDSSLSGSEV

SEQ ID NO: 5781 - protein, 128 aa, Artificial Sequence; identical to SEQ ID NO: 197
  Synthetic

SEQ ID NO: 5782 - protein, 21 aa, Artificial Sequence
  Synthetic
AREPIEGVIGGMIVNYYYMDV

SEQ ID NO: 5783 - protein, 111 aa, Artificial Sequence; identical to SEQ ID NO: 3783
  Synthetic

SEQ ID NO: 5784 - protein, 11 aa, Artificial Sequence
  Synthetic
SSYTSSNTLVV

SEQ ID NO: 5785 - protein, 118 aa, Artificial Sequence; identical to SEQ ID NO: 3729
  Synthetic

SEQ ID NO: 5786 - protein, 11 aa, Artificial Sequence
  Synthetic
ARRGSSWEIDH

SEQ ID NO: 5787 - protein, 110 aa, Artificial Sequence; identical to SEQ ID NO: 3731
  Synthetic

SEQ ID NO: 5788 - protein, 11 aa, Artificial Sequence
  Synthetic
AAWDDSLDGWM

SEQ ID NO: 5789 - protein, 110 aa, Artificial Sequence; identical to SEQ ID NO: 3789
  Synthetic

SEQ ID NO: 5790 - protein, 14 aa, Artificial Sequence
  Synthetic
VRDLGCGGDCPFDY

SEQ ID NO: 5791 - protein, 111 aa, Artificial Sequence; identical to SEQ ID NO: 3791
  Synthetic
  misc_feature (2)..(2): Xaa can be any naturally occurring amino acid

SEQ ID NO: 5792 - protein, 11 aa, Artificial Sequence
  Synthetic
QSYDSSLSGWV

SEQ ID NO: 5793 - protein, 120 aa, Artificial Sequence; identical to SEQ ID NO: 3793
  Synthetic

SEQ ID NO: 5794 - protein, 11 aa, Artificial Sequence
  Synthetic
TRAWIPTPHDY

SEQ ID NO: 5795 - protein, 109 aa, Artificial Sequence; identical to SEQ ID NO: 3795
  Synthetic

SEQ ID NO: 5796 - protein, 11 aa, Artificial Sequence
  Synthetic
AAWDDSLKGPV

SEQ ID NO: 5797 - protein, 119 aa, Artificial Sequence; identical to SEQ ID NO: 201
  Synthetic

SEQ ID NO: 5798 - protein, 12 aa, Artificial Sequence
  Synthetic
VRGLPVDWYFDL

SEQ ID NO: 5799 - protein, 111 aa, Artificial Sequence; identical to SEQ ID NO: 3799
  Synthetic

SEQ ID NO: 5800 - protein, 12 aa, Artificial Sequence
  Synthetic
QSYDKSLSVLYV

SEQ ID NO: 5801 - protein, 122 aa, Artificial Sequence; identical to SEQ ID NO: 3801
  Synthetic

SEQ ID NO: 5802 - protein, 15 aa, Artificial Sequence
  Synthetic
ARESFYCTSTTCYDV

SEQ ID NO: 5803 - protein, 111 aa, Artificial Sequence; identical to SEQ ID NO: 3803
  Synthetic

SEQ ID NO: 5804 - protein, 11 aa, Artificial Sequence
  Synthetic
QSYDSSLIGSV

SEQ ID NO: 5805 - protein, 121 aa, Artificial Sequence; identical to SEQ ID NO: 3805
  Synthetic

SEQ ID NO: 5806 - protein, 15 aa, Artificial Sequence
  Synthetic
ARLLSTEWLFNWFDP

SEQ ID NO: 5807 - protein, 107 aa, Artificial Sequence; identical to SEQ ID NO: 3807
  Synthetic

SEQ ID NO: 5808 - protein, 10 aa, Artificial Sequence
  Synthetic
QAWDSNTAYV

SEQ ID NO: 5809 - protein, 124 aa, Artificial Sequence; identical to SEQ ID NO: 3809
  Synthetic

SEQ ID NO: 5810 - protein, 17 aa, Artificial Sequence
  Synthetic
ARETGYSGYLAVAYMDV

SEQ ID NO: 5811 - protein, 111 aa, Artificial Sequence; identical to SEQ ID NO: 3811
  Synthetic

SEQ ID NO: 5812 - protein, 11 aa, Artificial Sequence
  Synthetic
QSYDSSLSGSL

SEQ ID NO: 5813 - protein, 122 aa, Artificial Sequence; identical to SEQ ID NO: 3801
  Synthetic

SEQ ID NO: 5814 - protein, 15 aa, Artificial Sequence
  Synthetic
ARESFYCTSTTCYDV

SEQ ID NO: 5815 - protein, 111 aa, Artificial Sequence; identical to SEQ ID NO: 3815
  Synthetic

SEQ ID NO: 5816 - protein, 11 aa, Artificial Sequence
  Synthetic
QSYDSSLIGSV

SEQ ID NO: 5817 - protein, 127 aa, Artificial Sequence; identical to SEQ ID NO: 139
  Synthetic

SEQ ID NO: 5818 - protein, 21 aa, Artificial Sequence
  Synthetic
ARAGFGFVITSRSGTDPLFDY

SEQ ID NO: 5819 - protein, 112 aa, Artificial Sequence; identical to SEQ ID NO: 3767
  Synthetic

SEQ ID NO: 5820 - protein, 12 aa, Artificial Sequence
  Synthetic
QSYDTSLSGSRV

SEQ ID NO: 5821 - protein, 121 aa, Artificial Sequence; identical to SEQ ID NO: 3821
  Synthetic

SEQ ID NO: 5822 - protein, 15 aa, Artificial Sequence
  Synthetic
ARLLSTEWSFNWFDP

SEQ ID NO: 5823 - protein, 107 aa, Artificial Sequence; identical to SEQ ID NO: 3823
  Synthetic

SEQ ID NO: 5824 - protein, 10 aa, Artificial Sequence
  Synthetic
QAWDSNSAYV

SEQ ID NO: 5825 - protein, 123 aa, Artificial Sequence; identical to SEQ ID NO: 3825
  Synthetic

SEQ ID NO: 5826 - protein, 16 aa, Artificial Sequence
  Synthetic
AKTMATHYYYYYGMDV

SEQ ID NO: 5827 - protein, 111 aa, Artificial Sequence; identical to SEQ ID NO: 3827
  Synthetic

SEQ ID NO: 5828 - protein, 11 aa, Artificial Sequence
  Synthetic
SSYAGSNYRWV

SEQ ID NO: 5829 - protein, 119 aa, Artificial Sequence; identical to SEQ ID NO: 3829
  Synthetic

SEQ ID NO: 5830 - protein, 12 aa, Artificial Sequence
  Synthetic
TRGVPVDWYFDF

SEQ ID NO: 5831 - protein, 112 aa, Artificial Sequence; identical to SEQ ID NO: 3831
  Synthetic

SEQ ID NO: 5832 - protein, 12 aa, Artificial Sequence
  Synthetic
QSFGTSLSALYV

SEQ ID NO: 5833 - protein, 123 aa, Artificial Sequence; identical to SEQ ID NO: 3833
  Synthetic

SEQ ID NO: 5834 - protein, 17 aa, Artificial Sequence
  Synthetic
ARGKGYSSSSAAYYFDS

SEQ ID NO: 5835 - protein, 112 aa, Artificial Sequence; identical to SEQ ID NO: 3835
  Synthetic

SEQ ID NO: 5836 - protein, 12 aa, Artificial Sequence
  Synthetic
QSYDSSLGGSEV

SEQ ID NO: 5837 - protein, 118 aa, Artificial Sequence; identical to SEQ ID NO: 3729
  Synthetic

SEQ ID NO: 5838 - protein, 11 aa, Artificial Sequence
  Synthetic
ARRGSSWEIDH

SEQ ID NO: 5839 - protein, 110 aa, Artificial Sequence; identical to SEQ ID NO: 3731
  Synthetic

SEQ ID NO: 5840 - protein, 11 aa, Artificial Sequence
  Synthetic
AAWDDSLDGWM

SEQ ID NO: 5841 - protein, 122 aa, Artificial Sequence; identical to SEQ ID NO: 211
  Synthetic

SEQ ID NO: 5842 - protein, 14 aa, Artificial Sequence
  Synthetic
ARGDTFGRGYYFDF

SEQ ID NO: 5843 - protein, 109 aa, Artificial Sequence; identical to SEQ ID NO: 3843
  Synthetic

SEQ ID NO: 5844 - protein, 12 aa, Artificial Sequence
  Synthetic
QVWDRSSDRPWV

SEQ ID NO: 5845 - protein, 124 aa, Artificial Sequence; identical to SEQ ID NO: 3845
  Synthetic

SEQ ID NO: 5846 - protein, 17 aa, Artificial Sequence
  Synthetic
ARETGYSGFLAVAYMDV

SEQ ID NO: 5847 - protein, 110 aa, Artificial Sequence; identical to SEQ ID NO: 3847
  Synthetic

SEQ ID NO: 5848 - protein, 11 aa, Artificial Sequence
  Synthetic
QSYDSSLSDSV

SEQ ID NO: 5849 - protein, 127 aa, Artificial Sequence; identical to SEQ ID NO: 139
  Synthetic

SEQ ID NO: 5850 - protein, 21 aa, Artificial Sequence
  Synthetic
ARAGFGFVITSRSGTDPLFDY

SEQ ID NO: 5851 - protein, 112 aa, Artificial Sequence; identical to SEQ ID NO: 3767
  Synthetic

SEQ ID NO: 5852 - protein, 12 aa, Artificial Sequence
  Synthetic
QSYDTSLSGSRV

SEQ ID NO: 5853 - protein, 118 aa, Artificial Sequence; identical to SEQ ID NO: 3853
  Synthetic

SEQ ID NO: 5854 - protein, 12 aa, Artificial Sequence
  Synthetic
ARLTMTTYYFDS

SEQ ID NO: 5855 - protein, 110 aa, Artificial Sequence; identical to SEQ ID NO: 3855
  Synthetic

SEQ ID NO: 5856 - protein, 13 aa, Artificial Sequence
  Synthetic
QVWDSFRDHQDWV

SEQ ID NO: 5857 - protein, 122 aa, Artificial Sequence; identical to SEQ ID NO: 3857
  Synthetic

SEQ ID NO: 5858 - protein, 14 aa, Artificial Sequence
  Synthetic
ARGDTFGRGYYFDY

SEQ ID NO: 5859 - protein, 109 aa, Artificial Sequence; identical to SEQ ID NO: 3859
  Synthetic

SEQ ID NO: 5860 - protein, 12 aa, Artificial Sequence
  Synthetic
QVWDRTIDHPWV

SEQ ID NO: 5861 - protein, 124 aa, Artificial Sequence; identical to SEQ ID NO: 3861
  Synthetic

SEQ ID NO: 5862 - protein, 17 aa, Artificial Sequence
  Synthetic
ARGVGYSSSGSNWYFDL

SEQ ID NO: 5863 - protein, 111 aa, Artificial Sequence; identical to SEQ ID NO: 3863
  Synthetic

SEQ ID NO: 5864 - protein, 11 aa, Artificial Sequence
  Synthetic
QSYDSSLSGSV

SEQ ID NO: 5865 - protein, 128 aa, Artificial Sequence; identical to SEQ ID NO: 3865
  Synthetic

SEQ ID NO: 5866 - protein, 21 aa, Artificial Sequence
  Synthetic
ARERGDYDYGSGSGKNWYFDL

SEQ ID NO: 5867 - protein, 111 aa, Artificial Sequence; identical to SEQ ID NO: 3867
  Synthetic

SEQ ID NO: 5868 - protein, 11 aa, Artificial Sequence
  Synthetic
QSYDSSLIASV

SEQ ID NO: 5869 - protein, 128 aa, Artificial Sequence; identical to SEQ ID NO: 3869
  Synthetic

SEQ ID NO: 5870 - protein, 22 aa, Artificial Sequence
  Synthetic
ARGQRAYYNRTGHYWGWRALDI

SEQ ID NO: 5871 - protein, 106 aa, Artificial Sequence; identical to SEQ ID NO: 3871
  Synthetic

SEQ ID NO: 5872 - protein, 9 aa, Artificial Sequence
  Synthetic
QVWDSSSDQ

SEQ ID NO: 5873 - protein, 121 aa, Artificial Sequence; identical to SEQ ID NO: 203
  Synthetic

SEQ ID NO: 5874 - protein, 15 aa, Artificial Sequence
  Synthetic
ARMLSTEWSFNWFDP

SEQ ID NO: 5875 - protein, 107 aa, Artificial Sequence; identical to SEQ ID NO: 3875
  Synthetic

SEQ ID NO: 5876 - protein, 10 aa, Artificial Sequence
  Synthetic
QAWDSTSASV

SEQ ID NO: 5877 - protein, 120 aa, Artificial Sequence; identical to SEQ ID NO: 143
  Synthetic

SEQ ID NO: 5878 - protein, 11 aa, Artificial Sequence
  Synthetic
SRAWIPTPHDY

SEQ ID NO: 5879 - protein, 109 aa, Artificial Sequence; identical to SEQ ID NO: 3715
  Synthetic

SEQ ID NO: 5880 - protein, 11 aa, Artificial Sequence
  Synthetic
AAWDDSLKGPV

SEQ ID NO: 5881 - protein, 119 aa, Artificial Sequence; identical to SEQ ID NO: 3881
  Synthetic

SEQ ID NO: 5882 - protein, 12 aa, Artificial Sequence
  Synthetic
ARGVAVDWHFDL

SEQ ID NO: 5883 - protein, 112 aa, Artificial Sequence; identical to SEQ ID NO: 3883
  Synthetic

SEQ ID NO: 5884 - protein, 12 aa, Artificial Sequence
  Synthetic
QSSGSVLSDLYV

SEQ ID NO: 5885 - protein, 119 aa, Artificial Sequence; identical to SEQ ID NO: 3885
  Synthetic

SEQ ID NO: 5886 - protein, 12 aa, Artificial Sequence
  Synthetic
ARGVAVDWYFDL

SEQ ID NO: 5887 - protein, 112 aa, Artificial Sequence; identical to SEQ ID NO: 3887
  Synthetic

SEQ ID NO: 5888 - protein, 12 aa, Artificial Sequence
  Synthetic
QSYGSSLSALYV

SEQ ID NO: 5889 - protein, 116 aa, Artificial Sequence; identical to SEQ ID NO: 207
  Synthetic

SEQ ID NO: 5890 - protein, 11 aa, Artificial Sequence
  Synthetic
ANQGYYYYMDV

SEQ ID NO: 5891 - protein, 111 aa, Artificial Sequence; identical to SEQ ID NO: 3891
  Synthetic

SEQ ID NO: 5892 - protein, 11 aa, Artificial Sequence
  Synthetic
TSYTNTTTPWV

SEQ ID NO: 5893 - protein, 126 aa, Artificial Sequence; identical to SEQ ID NO: 3893
  Synthetic

SEQ ID NO: 5894 - protein, 19 aa, Artificial Sequence
  Synthetic
AKDLFRVVVPVAAAFYFDS

SEQ ID NO: 5895 - protein, 108 aa, Artificial Sequence; identical to SEQ ID NO: 3895
  Synthetic

SEQ ID NO: 5896 - protein, 9 aa, Artificial Sequence
  Synthetic
TSYTNSSNI

SEQ ID NO: 5897 - protein, 119 aa, Artificial Sequence; identical to SEQ ID NO: 3897
  Synthetic

SEQ ID NO: 5898 - protein, 12 aa, Artificial Sequence
  Synthetic
ARGVAVDWNFDL

SEQ ID NO: 5899 - protein, 112 aa, Artificial Sequence; identical to SEQ ID NO: 3899
  Synthetic

SEQ ID NO: 5900 - protein, 12 aa, Artificial Sequence
  Synthetic
QSYDTSLNTLYV

SEQ ID NO: 5901 - protein, 124 aa, Artificial Sequence; identical to SEQ ID NO: 3901
  Synthetic

SEQ ID NO: 5902 - protein, 17 aa, Artificial Sequence
  Synthetic
ARVKGYSSPSAAYYFDY

SEQ ID NO: 5903 - protein, 112 aa, Artificial Sequence; identical to SEQ ID NO: 3903
  Synthetic

SEQ ID NO: 5904 - protein, 12 aa, Artificial Sequence
  Synthetic
QSYDSSLGGSEV

SEQ ID NO: 5905 - protein, 128 aa, Artificial Sequence; identical to SEQ ID NO: 3905
  Synthetic

SEQ ID NO: 5906 - protein, 21 aa, Artificial Sequence
  Synthetic
ARDATYCSSTRCYTSTGYFDY

SEQ ID NO: 5907 - protein, 109 aa, Artificial Sequence; identical to SEQ ID NO: 3907
  Synthetic

SEQ ID NO: 5908 - protein, 12 aa, Artificial Sequence
  Synthetic
QVWDSSSGHHYV

SEQ ID NO: 5909 - protein, 123 aa, Artificial Sequence; identical to SEQ ID NO: 3909
  Synthetic

SEQ ID NO: 5910 - protein, 16 aa, Artificial Sequence
  Synthetic
AKVDSTYYYYYYGMDV

SEQ ID NO: 5911 - protein, 110 aa, Artificial Sequence; identical to SEQ ID NO: 3911
  Synthetic

SEQ ID NO: 5912 - protein, 10 aa, Artificial Sequence
  Synthetic
SSYTSSSSWV

SEQ ID NO: 5913 - protein, 118 aa, Artificial Sequence; identical to SEQ ID NO: 3693
  Synthetic

SEQ ID NO: 5914 - protein, 11 aa, Artificial Sequence
  Synthetic
VRRGSSWEIDY

SEQ ID NO: 5915 - protein, 110 aa, Artificial Sequence; identical to SEQ ID NO: 3695
  Synthetic

SEQ ID NO: 5916 - protein, 11 aa, Artificial Sequence
  Synthetic
AAWDDSLDGWV

SEQ ID NO: 5917 - protein, 122 aa, Artificial Sequence; identical to SEQ ID NO: 213
  Synthetic

SEQ ID NO: 5918 - protein, 15 aa, Artificial Sequence
  Synthetic
AKSDHGDYVIGAFDI

SEQ ID NO: 5919 - protein, 110 aa, Artificial Sequence; identical to SEQ ID NO: 3747
  Synthetic

SEQ ID NO: 5920 - protein, 10 aa, Artificial Sequence
  Synthetic
NSYAGSNNWV

SEQ ID NO: 5921 - protein, 126 aa, Artificial Sequence; identical to SEQ ID NO: 3921
  Synthetic

SEQ ID NO: 5922 - protein, 19 aa, Artificial Sequence
  Synthetic
ARDRGTTSSYYSYYYGMDV

SEQ ID NO: 5923 - protein, 108 aa, Artificial Sequence; identical to SEQ ID NO: 3923
  Synthetic

SEQ ID NO: 5924 - protein, 9 aa, Artificial Sequence
  Synthetic
QQYGSSPGT

SEQ ID NO: 5925 - protein, 120 aa, Artificial Sequence; identical to SEQ ID NO: 3925
  Synthetic

SEQ ID NO: 5926 - protein, 13 aa, Artificial Sequence
  Synthetic
AKENYRGTGYLES

SEQ ID NO: 5927 - protein, 107 aa, Artificial Sequence; identical to SEQ ID NO: 3927
  Synthetic

SEQ ID NO: 5928 - protein, 9 aa, Artificial Sequence
  Synthetic
QHFHSYPYS

SEQ ID NO: 5929 - protein, 125 aa, Artificial Sequence; identical to SEQ ID NO: 3929
  Synthetic

SEQ ID NO: 5930 - protein, 19 aa, Artificial Sequence
  Synthetic
VRRPRRYCSGDTCRGAFDI

SEQ ID NO: 5931 - protein, 107 aa, Artificial Sequence; identical to SEQ ID NO: 3931
  Synthetic

SEQ ID NO: 5932 - protein, 9 aa, Artificial Sequence
  Synthetic
QKYKIDPFT

SEQ ID NO: 5933 - protein, 124 aa, Artificial Sequence; identical to SEQ ID NO: 163
  Synthetic

SEQ ID NO: 5934 - protein, 17 aa, Artificial Sequence
  Synthetic
AREGVALAGNGVDGFDI

SEQ ID NO: 5935 - protein, 107 aa, Artificial Sequence; identical to SEQ ID NO: 164
  Synthetic

SEQ ID NO: 5936 - protein, 9 aa, Artificial Sequence
  Synthetic
QQTYSTPYT

SEQ ID NO: 5937 - protein, 128 aa, Artificial Sequence; identical to SEQ ID NO: 3937
  Synthetic

SEQ ID NO: 5938 - protein, 21 aa, Artificial Sequence
  Synthetic
ARMWVVAGTTDDYYYHYGMDV

SEQ ID NO: 5939 - protein, 107 aa, Artificial Sequence; identical to SEQ ID NO: 3939
  Synthetic

SEQ ID NO: 5940 - protein, 9 aa, Artificial Sequence
  Synthetic
QQYDNLPYT

SEQ ID NO: 5941 - protein, 116 aa, Artificial Sequence; identical to SEQ ID NO: 3941
  Synthetic

SEQ ID NO: 5942 - protein, 11 aa, Artificial Sequence
  Synthetic
ARDRGGGILDY

SEQ ID NO: 5943 - protein, 108 aa, Artificial Sequence; identical to SEQ ID NO: 3943
  Synthetic

SEQ ID NO: 5944 - protein, 10 aa, Artificial Sequence
  Synthetic
QQYGNLPKYT

SEQ ID NO: 5945 - protein, 131 aa, Artificial Sequence; identical to SEQ ID NO: 3945
  Synthetic

SEQ ID NO: 5946 - protein, 21 aa, Artificial Sequence
  Synthetic
ARMWVVAGTTDDYYYHYGMDV

SEQ ID NO: 5947 - protein, 107 aa, Artificial Sequence; identical to SEQ ID NO: 3947
  Synthetic

SEQ ID NO: 5948 - protein, 9 aa, Artificial Sequence
  Synthetic
QQTNTLPLS

SEQ ID NO: 5949 - protein, 124 aa, Artificial Sequence; identical to SEQ ID NO: 3949
  Synthetic

SEQ ID NO: 5950 - protein, 17 aa, Artificial Sequence
  Synthetic
ARGSGAARSYYYYGLDV

SEQ ID NO: 5951 - protein, 107 aa, Artificial Sequence; identical to SEQ ID NO: 3951
  Synthetic

SEQ ID NO: 5952 - protein, 9 aa, Artificial Sequence
  Synthetic
QQTYSTPPT

SEQ ID NO: 5953 - protein, 117 aa, Artificial Sequence; identical to SEQ ID NO: 151
  Synthetic

SEQ ID NO: 5954 - protein, 12 aa, Artificial Sequence
  Synthetic
TRLGGYRYGMDV

SEQ ID NO: 5955 - protein, 107 aa, Artificial Sequence; identical to SEQ ID NO: 3955
  Synthetic

SEQ ID NO: 5956 - protein, 9 aa, Artificial Sequence
  Synthetic
LQYDNLPYT

SEQ ID NO: 5957 - protein, 125 aa, Artificial Sequence; identical to SEQ ID NO: 3929
  Synthetic

SEQ ID NO: 5958 - protein, 19 aa, Artificial Sequence
  Synthetic
VRRPRRYCSGDTCRGAFDI

SEQ ID NO: 5959 - protein, 107 aa, Artificial Sequence; identical to SEQ ID NO: 3931
  Synthetic

SEQ ID NO: 5960 - protein, 9 aa, Artificial Sequence
  Synthetic
QKYKIDPFT

SEQ ID NO: 5961 - protein, 131 aa, Artificial Sequence; identical to SEQ ID NO: 3961
  Synthetic
  misc_feature (67)..(67): Xaa can be any naturally occurring amino acid

SEQ ID NO: 5962 - protein, 24 aa, Artificial Sequence
  Synthetic
ARDYIERVFARREQGLFHYSYMDV

SEQ ID NO: 5963 - protein, 107 aa, Artificial Sequence; identical to SEQ ID NO: 3963
  Synthetic

SEQ ID NO: 5964 - protein, 9 aa, Artificial Sequence
  Synthetic
QHNYINPRT

SEQ ID NO: 5965 - protein, 122 aa, Artificial Sequence; identical to SEQ ID NO: 3965
  Synthetic

SEQ ID NO: 5966 - protein, 14 aa, Artificial Sequence
  Synthetic
TRGLRFLDYPVLDV

SEQ ID NO: 5967 - protein, 110 aa, Artificial Sequence; identical to SEQ ID NO: 3967
  Synthetic

SEQ ID NO: 5968 - protein, 11 aa, Artificial Sequence
  Synthetic
QQYGSSLYMYT

SEQ ID NO: 5969 - protein, 127 aa, Artificial Sequence; identical to SEQ ID NO: 3969
  Synthetic

SEQ ID NO: 5970 - protein, 20 aa, Artificial Sequence
  Synthetic
ARVGPPGWLQSDYDYYGMDV

SEQ ID NO: 5971 - protein, 104 aa, Artificial Sequence; identical to SEQ ID NO: 3971
  Synthetic

SEQ ID NO: 5972 - protein, 5 aa, Artificial Sequence
  Synthetic
QQFSA

SEQ ID NO: 5973 - protein, 117 aa, Artificial Sequence; identical to SEQ ID NO: 3973
  Synthetic

SEQ ID NO: 5974 - protein, 11 aa, Artificial Sequence
  Synthetic
ARDRGGGILDF

SEQ ID NO: 5975 - protein, 107 aa, Artificial Sequence; identical to SEQ ID NO: 3975
  Synthetic

SEQ ID NO: 5976 - protein, 10 aa, Artificial Sequence
  Synthetic
QQYGNLPKYT

SEQ ID NO: 5977 - protein, 117 aa, Artificial Sequence; identical to SEQ ID NO: 3977
  Synthetic

SEQ ID NO: 5978 - protein, 11 aa, Artificial Sequence
  Synthetic
ARDLYYYGMDV

SEQ ID NO: 5979 - protein, 106 aa, Artificial Sequence; identical to SEQ ID NO: 3979
  Synthetic

SEQ ID NO: 5980 - protein, 8 aa, Artificial Sequence
  Synthetic
QELNSYPS

SEQ ID NO: 5981 - protein, 123 aa, Artificial Sequence; identical to SEQ ID NO: 3981
  Synthetic

SEQ ID NO: 5982 - protein, 16 aa, Artificial Sequence
  Synthetic
AKVRLYSTYLRGPFDI

SEQ ID NO: 5983 - protein, 108 aa, Artificial Sequence; identical to SEQ ID NO: 3983
  Synthetic

SEQ ID NO: 5984 - protein, 10 aa, Artificial Sequence
  Synthetic
QQYDNLSPLT

SEQ ID NO: 5985 - protein, 117 aa, Artificial Sequence; identical to SEQ ID NO: 3973
  Synthetic

SEQ ID NO: 5986 - protein, 11 aa, Artificial Sequence
  Synthetic
ARDRGGGILDF

SEQ ID NO: 5987 - protein, 107 aa, Artificial Sequence; identical to SEQ ID NO: 3947
  Synthetic

SEQ ID NO: 5988 - protein, 9 aa, Artificial Sequence
  Synthetic
QQTNTLPLS

SEQ ID NO: 5989 - protein, 124 aa, Artificial Sequence; identical to SEQ ID NO: 3989
  Synthetic

SEQ ID NO: 5990 - protein, 16 aa, Artificial Sequence
  Synthetic
ARVDSSGWYTGDTFDI

SEQ ID NO: 5991 - protein, 108 aa, Artificial Sequence; identical to SEQ ID NO: 3991
  Synthetic

SEQ ID NO: 5992 - protein, 10 aa, Artificial Sequence
  Synthetic
QQSFPTPPYT

SEQ ID NO: 5993 - protein, 122 aa, Artificial Sequence; identical to SEQ ID NO: 3993
  Synthetic

SEQ ID NO: 5994 - protein, 15 aa, Artificial Sequence
  Synthetic
ARHYDILTSLSWFDP

SEQ ID NO: 5995 - protein, 108 aa, Artificial Sequence; identical to SEQ ID NO: 3995
  Synthetic

SEQ ID NO: 5996 - protein, 9 aa, Artificial Sequence
  Synthetic
QQYGSSLYT

SEQ ID NO: 5997 - protein, 125 aa, Artificial Sequence; identical to SEQ ID NO: 3997
  Synthetic

SEQ ID NO: 5998 - protein, 19 aa, Artificial Sequence
  Synthetic
ARQRDTDMAMLFQYTGLDV

SEQ ID NO: 5999 - protein, 107 aa, Artificial Sequence; identical to SEQ ID NO: 3999
  Synthetic

SEQ ID NO: 6000 - protein, 9 aa, Artificial Sequence
  Synthetic
QQTYSTPRT

SEQ ID NO: 6001 - protein, 131 aa, Artificial Sequence
  Synthetic
QVQLVQSGAEVKKPGSSVKVSCKASGGTFSRHVISWVRQAPGQGLEWMGGIIPMFGTANYAQKFQGRVTITADESTSTAYMELSSLRSEDTAVYYCAREDFILVSAPIRENSYYYYGMDVWGQGTTVTVSS

SEQ ID NO: 6002 - protein, 24 aa, Artificial Sequence
  Synthetic
AREDFILVSAPIRENSYYYYGMDV

SEQ ID NO: 6003 - protein, 108 aa, Artificial Sequence
  Synthetic
EIVLTQSPGTLSLSPGERATLSCRASQSVSSNYLAWYQQKPGQAPRLLIYDASSRATGIPDRFSGSGSGTDFTLTISRLEPEDFAVYYCQQYGGSPRTFGQGTKVEIK

SEQ ID NO: 6004 - protein, 9 aa, Artificial Sequence
  Synthetic
QQYGGSPRT

SEQ ID NO: 6005 - protein, 117 aa, Artificial Sequence
  Synthetic
EVQLLESGGGLVQPGGSLRLSCAASGFTFSNYVMNWVRQAPGKGLEWVSAISGSAGATNYADSVMGRFTISRDNSKNTLYLQMNGLRAEDTAVYFCAKTGPSQGDYWGLGTLVSVSS

SEQ ID NO: 6006 - protein, 10 aa, Artificial Sequence
  Synthetic
AKTGPSQGDY

SEQ ID NO: 6007 - protein, 112 aa, Artificial Sequence
  Synthetic
DIVMTQSPDSLAVSLGERATINCKSSQSLLYSSNNKNYLAWYQQKPGQPPKRLIYWASTRESGVPDRFSGSGSGTDFTLTISSLQAEDVAVYYCQQYYSWCSFGQGTKLEIK

SEQ ID NO: 6008 - protein, 8 aa, Artificial Sequence
  Synthetic
QQYYSWCS

SEQ ID NO: 6009 - protein, 115 aa, Artificial Sequence
  Synthetic
EVQLVESGGGLVQPGGSLRVSCAASGLTVSYNYMTWVRQIPGKGLDWVSVIYPGGSTFYADAVRGRFTISRDNSKNTLYLQMNGLRVEDTAVYYCARESYGLDVWGQGTTVTVSS

SEQ ID NO: 6010 - protein, 9 aa, Artificial Sequence
  Synthetic
ARESYGLDV

SEQ ID NO: 6011 - protein, 109 aa, Artificial Sequence
  Synthetic
EIVLTQSPGTLSLSPGERATLSCRASQGISSNYLAWYQQKPGQAPRLLIYGASSRATGIPDRFSGSGSGTDFTLTISRLEPEDFAVYYCQLYGSSSGYTFGQGTKLEIK

SEQ ID NO: 6012 - protein, 10 aa, Artificial Sequence
  Synthetic
QLYGSSSGYT

SEQ ID NO: 6013 - protein, 117 aa, Artificial Sequence
  Synthetic
EVQLVESGGGLIQPGGSLRLSCAASGITVSSNYMTWVRQAPGKGLEWVSLIYAGGSTFYAESVKGRFIISRDNSNNTVYLQMNSLRADDTAVYYCARDLDYYGMDVWGQGTTVTVSS

SEQ ID NO: 6014 - protein, 11 aa, Artificial Sequence
  Synthetic
ARDLDYYGMDV

SEQ ID NO: 6015 - protein, 106 aa, Artificial Sequence
  Synthetic
DIQLTQSPSFLSASVGDRVTITCRASQGISSYLAWYQQKPGKAPKLLIYAASTLQSGVPSRFSGSGSGTEFTLTISSLQPEDFATYYCQQLGSSPVCFGPGTKLDI

SEQ ID NO: 6016 - protein, 9 aa, Artificial Sequence
  Synthetic
QQLGSSPVC

SEQ ID NO: 6017 - protein, 122 aa, Artificial Sequence
  Synthetic
EVQLVESGGGLVQPGGSLRLSCAASGFTFRNYDMHWVRQVAGKGLEWVSGIGTAGDTYYPDSVKGRFTISRENAKNSVYLQMNNLRAGDTAVYFCARDREISGWTGWYFDLWGRGTLVIVSS

SEQ ID NO: 6018 - protein, 16 aa, Artificial Sequence
  Synthetic
ARDREISGWTGWYFDL

SEQ ID NO: 6019 - protein, 108 aa, Artificial Sequence
  Synthetic
DIQMTQSPSSLSASVGDRVTITCRASQTIHNYLNWYHQIPGKPPRLLIYTTNNLQSGVPSRFSGSGSGTDFTLTITGLQPEDFATYYCQQSYSTPPITFGQGTRLEIK

SEQ ID NO: 6020 - protein, 10 aa, Artificial Sequence
  Synthetic
QQSYSTPPIT

SEQ ID NO: 6021 - protein, 128 aa, Artificial Sequence
  Synthetic
QVQLVESGGGVVQPGRSLRLSCAASGFTFSSSGMHWVRQAPGKGLEWVAVISYDGSNKYYEDSVKGRFTISRDNSKNTLYLQLNNLRVEDTAVYYCARDTPGGDDIMTGWGLYGMDVWGQGTTVTVSS

SEQ ID NO: 6022 - protein, 21 aa, Artificial Sequence
  Synthetic
ARDTPGGDDIMTGWGLYGMDV

SEQ ID NO: 6023 - protein, 106 aa, Artificial Sequence
  Synthetic
  misc_feature (83)..(83): Xaa can be any naturally occurring amino acid
DIQMTQSPSSLSASVGDRVTITCRSSQSISRYLNWYQHKPGKAPKLLIYAAISLQSGVPSRFSGDGSGTDFTLTISSLQLEDXAHSSCQHSYSTPSTFGQGHKGAI

SEQ ID NO: 6024 - protein, 9 aa, Artificial Sequence
  Synthetic
QHSYSTPST

SEQ ID NO: 6025 - protein, 122 aa, Artificial Sequence
  Synthetic
EVQLVESGGGLVQPGGSLRLSCAASGFTFRNYDMHWLLQVAGKGLEWVSAIGTSGDTYYPDSVKGRFTISRENAKNSVYLQMNNLRAGDTAVYFCVRDREISGWTGWYFDLWGRGTLVIVSS

SEQ ID NO: 6026 - protein, 16 aa, Artificial Sequence
  Synthetic
VRDREISGWTGWYFDL

SEQ ID NO: 6027 - protein, 108 aa, Artificial Sequence
  Synthetic
DIQMTQSPSSLSASVGDRVTITCRASQTIHNYLNWYQQIPGKAPRLLIYATNTLQSGVPSRFSGSGSGTDFTLTITGLQPEDFATYYCQQSYSTPPITFGQGTRLEIK

SEQ ID NO: 6028 - protein, 10 aa, Artificial Sequence
  Synthetic
QQSYSTPPIT

SEQ ID NO: 6029 - protein, 123 aa, Artificial Sequence
  Synthetic
QVQLVQSGAEVKKPGASVKVSCKASGYTFTDYYIHWVRQAPGQGLEWMGWINPKTGGINFAQKFQGRVTMTRDSSITTVYMELSRLTSDDTAIYYCATDDGGSWSGSSWFDPWGQGTLVTVSS

SEQ ID NO: 6030 - protein, 16 aa, Artificial Sequence
  Synthetic
ATDDGGSWSGSSWFDP

SEQ ID NO: 6031 - protein, 108 aa, Artificial Sequence
  Synthetic
DIQMTQSPSSLSASVGDRVTITCRASQSISSDLNWYRQKPGKAPRLLIYAASSLQSGVPSRFSGSGSGTDFTLTISSLQPEDFATYYCQQSYSTPPFTFGPGTKVDIK

SEQ ID NO: 6032 - protein, 10 aa, Artificial Sequence
  Synthetic
QQSYSTPPFT

SEQ ID NO: 6033 - protein, 127 aa, Artificial Sequence
  Synthetic
QVQLVESGGGVVQPGRSLRLSCAASGFTFSTYGMNWVRQAPGKGLEWVALILYDGSDKYYADSVKSRFTISRDNSRNTLYLQMTSLRAEDTAVYYCAKALSSTYYYDASGPDAFDIWGQGTMVTVSA

SEQ ID NO: 6034 - protein, 20 aa, Artificial Sequence
  Synthetic
AKALSSTYYYDASGPDAFDI

SEQ ID NO: 6035 - protein, 107 aa, Artificial Sequence; identical to SEQ ID NO: 428
  Synthetic

SEQ ID NO: 6036 - protein, 9 aa, Artificial Sequence
  Synthetic
QQYNSYSYT

SEQ ID NO: 6037 - protein, 122 aa, Artificial Sequence
  Synthetic
EVQLLESGGGLVQPGGSLRLSCAASGFSFSNYAMSWVRQAPGKGLEWVSSISGSGGSPYYADSVKGRFTISRDSSKSTLYLQMNSLSAEDTAVYYCAKSPLVYAPHIFFDCWGQGTLVTVSS

SEQ ID NO: 6038 - protein, 15 aa, Artificial Sequence
  Synthetic
AKSPLVYAPHIFFDC

SEQ ID NO: 6039 - protein, 106 aa, Artificial Sequence
  Synthetic
EIVLTQSPATLSLSPGERATLSCRTSQSVSSSLAWYQQKPGQAPRLLIYDASNRATAVPARFSGSGSGTDFTLTISSLEPEDFAVYYCQQHSNWLTFGGGTKVEIK

SEQ ID NO: 6040 - protein, 8 aa, Artificial Sequence
  Synthetic
QQHSNWLT

SEQ ID NO: 6041 - protein, 124 aa, Artificial Sequence
  Synthetic
EVQLVESGGGLVQPGGSLRLSCAASGFTFSNYSMHWVRQAPGKGLEWVSYISSSSSTIYYADSVKGRFTISRDNAKNSLYLQLNSLRDEDTAVYYCARQGGQQLSYYYYGMDVWGQGTTVTVSS

SEQ ID NO: 6042 - protein, 17 aa, Artificial Sequence
  Synthetic
ARQGGQQLSYYYYGMDV

SEQ ID NO: 6043 - protein, 107 aa, Artificial Sequence
  Synthetic
DIQMTQSPSSLSASVGDRATITCRASQSIGSYLNWYQHKPGKAPKLLIYAASSLQSGVPSGFSGSGSGTDFTLTISSLQPEDFATYYCQQSYSTPGTFGQGTKVEIK

SEQ ID NO: 6044 - protein, 9 aa, Artificial Sequence
  Synthetic
QQSYSTPGT

SEQ ID NO: 6045 - protein, 121 aa, Artificial Sequence
  Synthetic
EVQLVESGGALVQPGRSLRLSCAASGFTFDDYAMHWVRQAPGKGLEWVSSISWNGVSIGYADSVRGRFTISRDNAKNSLYLQMNSLKIGDTAFYYCARGLDGSSSASPDSWGQGTLVTVSS

SEQ ID NO: 6046 - protein, 14 aa, Artificial Sequence
  Synthetic
ARGLDGSSSASPDS

SEQ ID NO: 6047 - protein, 107 aa, Artificial Sequence
  Synthetic
DIQMTQSPSSVSASVGDRVTITCRASQGIGSWLAWYQQKPGKAPKLLIYLASSLQSGVPSRFSGSGSGTYFTLTISGLQPEDFATYYCQQGNSFPLTFGGGTKVEIK

SEQ ID NO: 6048 - protein, 9 aa, Artificial Sequence
  Synthetic
QQGNSFPLT

SEQ ID NO: 6049 - protein, 122 aa, Artificial Sequence
  Synthetic
EVQLLESGGGLVQPGGSLRLSCAASGFTFSSYAMSWVRQAPGKGLEWVSAISGSGDGTFYADSVKGRFTISRDNSKNTMYLQMNSLRAEDTAVYYCAKDFGAFIIGDWFDPWGQGTLVTVSS

SEQ ID NO: 6050 - protein, 15 aa, Artificial Sequence
  Synthetic
AKDFGAFIIGDWFDP

SEQ ID NO: 6051 - protein, 108 aa, Artificial Sequence
  Synthetic
EIVMTQSPATLSVSPGERATLSCRASQTVRSNLAWYQQKPGQAPRLLIYGASTRATGIPARFSGSGSGTEFTLTISSLQSEDFAVYYCQQYNNWPPITFGQGTRLEIK

SEQ ID NO: 6052 - protein, 10 aa, Artificial Sequence
  Synthetic
QQYNNWPPIT

SEQ ID NO: 6053 - protein, 125 aa, Artificial Sequence
  Synthetic
EVQLLESGGGLVHPGGSLRLSCAASGFTFSTYAMHWVRQAPGKGLEWVSAISGSGTGTFYADSVKGRFSISRDNSKNTLYLQMNSLRAEDTAVYYCATERIAVSDTRMYNWFDPWGQGTLVTVSS

SEQ ID NO: 6054 - protein, 18 aa, Artificial Sequence
  Synthetic
ATERIAVSDTRMYNWFDP

SEQ ID NO: 6055 - protein, 108 aa, Artificial Sequence
  Synthetic
DIQMTQSPSSLSASVGDRVTLTCRASQGISTYLNWYQQKPGKAPNLLIYAASSLQSGVPSRFSGSGSGTDFTLTISSLQPEDFATYYCQQSYSAPPWTFGQGTKVEIK

SEQ ID NO: 6056 - protein, 10 aa, Artificial Sequence
  Synthetic
QQSYSAPPWT

SEQ ID NO: 6057 - protein, 124 aa, Artificial Sequence
  Synthetic
QLQLQESGPGLVKPSETLSLTCTVSGGAISSRNYHWGWIRQPPGKGLEWIGSIYYSGSTYYSPSLKSRVTISVDTSKNQFSLRLSSVTAADTAVYYCARLETSGWYTEDVFDIWGQGTMVTVSS

SEQ ID NO: 6058 - protein, 16 aa, Artificial Sequence
  Synthetic
ARLETSGWYTEDVFDI

SEQ ID NO: 6059 - protein, 107 aa, Artificial Sequence
  Synthetic
DIQMTQSPSSLSASVGDRVTITCRASQSISSYLNWYQQKPGKAPKLLIYAASSLQSGVPSRFSGSGSGTDFTLTISSLLPEDFATYYCQRSYSAMYTFGQGTRLEIQ

SEQ ID NO: 6060 - protein, 9 aa, Artificial Sequence
  Synthetic
QRSYSAMYT

SEQ ID NO: 6061 - protein, 127 aa, Artificial Sequence
  Synthetic
QVQLVESGGGVVQPGRSLRLSCATSGFTFSNYGMHWVRQAPGKGLEWVAVIWFDGSSEYYADSVKGRFTISRDNSKKTLYLQVNNLRGEDSAVYYCAREGWHYDSSYYREYDDLDIWGQGTMVTVSS

SEQ ID NO: 6062 - protein, 20 aa, Artificial Sequence
  Synthetic
AREGWHYDSSYYREYDDLDI

SEQ ID NO: 6063 - protein, 113 aa, Artificial Sequence
  Synthetic
DIVMTQTPLSLPVSLGDQASISCRSSQSLVHSDGNTYLHWYLQKPGQSPKLLIYKVSNRFSGVPDRFSGSGSGTDFTLTISRVEAEDLGVYFCSQSTHVPPWTFGGGTRLEIK

SEQ ID NO: 6064 - protein, 10 aa, Artificial Sequence
  Synthetic
SQSTHVPPWT

SEQ ID NO: 6065 - protein, 117 aa, Artificial Sequence
  Synthetic
EVQLVESGGGLVQPGGSLRLSCAASGLTVTSNYMSWVRQAPGRGLEWVSLIYPGGTTYYADSVKGRFTVSRDNSKNTLYLQMDSLRAEDTGVYYCARETLGRGGDCWGQGTLVTVSS

SEQ ID NO: 6066 - protein, 11 aa, Artificial Sequence
  Synthetic
ARETLGRGGDC

SEQ ID NO: 6067 - protein, 107 aa, Artificial Sequence
  Synthetic
DIQMTQSPSSLSASVGDRVTITCQASQDISNFLNWYQQKPGKAPKLLIYDASNLETGVPSRFSGSRSGTDFTFTISSLQPDDIATYYCQQYDNLPRSFGQGTKLEIK

SEQ ID NO: 6068 - protein, 9 aa, Artificial Sequence
  Synthetic
QQYDNLPRS

SEQ ID NO: 6069 - protein, 122 aa, Artificial Sequence
  Synthetic
EVQLVESGGGLVQPGGSLRLSCAASGFTFSTYDMHWVRQTTEKSLEWVSAIGTAGDTYYPDSVKGRFIVSRENAKNSLYLQMNNLRAGDTAVYYCARDRETSGWYGWYFDLWGRGTLVTVSS

SEQ ID NO: 6070 - protein, 16 aa, Artificial Sequence
  Synthetic
ARDRETSGWYGWYFDL

SEQ ID NO: 6071 - protein, 108 aa, Artificial Sequence
  Synthetic
DIQMTQSPSSLSASVGDRVTVTCRASQSIRNFLNWYQQKPGKAPKLLIYTTSTLQSGVPSRFSGSGSGTDFTLTISSLQPEDFATYYCQQSYSTPPITFGQGTRLDMK

SEQ ID NO: 6072 - protein, 10 aa, Artificial Sequence
  Synthetic
QQSYSTPPIT

SEQ ID NO: 6073 - protein, 128 aa, Artificial Sequence
  Synthetic
QVQLVESGGGVVQPGRSLRLSCTASGFTFSTAGMHWVRQAPGKGLEWVAVISYDGSNKDYADSVKGRFTISRDNSKSTLYLQMNSLRPEDTAVYYCAKDTPGGDDIMTGWGLYGMDVWGQGTTVIASS

SEQ ID NO: 6074 - protein, 21 aa, Artificial Sequence
  Synthetic
AKDTPGGDDIMTGWGLYGMDV

SEQ ID NO: 6075 - protein, 107 aa, Artificial Sequence
  Synthetic
DIQMTQSPSSLSASVGDRVTITCRASQSISSYLNWYHQKPGKAPKLLIYAAISLQSGVPSRFSGSGFGTDFTLTISSLQPEDFAIYYCQQSYSTPWTFDQGTKVEIK

SEQ ID NO: 6076 - protein, 9 aa, Artificial Sequence
  Synthetic
QQSYSTPWT

SEQ ID NO: 6077 - protein, 122 aa, Artificial Sequence
  Synthetic
QVQLVQSGAEVKKPGASVKVSCKASGYTFSDYYIHWVRQAPGQGLEWMGIINPSGGSTAYAQKFQGRVTMTGDASTSTVYMELNSLRSEDTAVYYCARDIVLVPAAYGMDVWGQGTTVIVSS

SEQ ID NO: 6078 - protein, 15 aa, Artificial Sequence
  Synthetic
ARDIVLVPAAYGMDV

SEQ ID NO: 6079 - protein, 108 aa, Artificial Sequence
  Synthetic
EIVLTQSPATLSLSPGERATLSCRASQSISTYLAWYQQKPGQAPRLLIYDASNRATGIPARFSGSGSGTDFTLTISSLEPEDFAVYYCQQRNNWPPLTFGGGTKVEVK

SEQ ID NO: 6080 - protein, 10 aa, Artificial Sequence
  Synthetic
QQRNNWPPLT

SEQ ID NO: 6081 - protein, 130 aa, Artificial Sequence
  Synthetic
EVQLVESGGGLVQPGGSLRLSCAASGFTFSAYDMHWVRQVTGKGLEWVSAIGTAGDTYYPDDTFDPDSVKGRFTVSRENAKNSLYLQMNSLRAGDTAVYYCVRGDMLTGSSQYYYIMDVWGQGTTVTVSS

SEQ ID NO: 6082 - protein, 18 aa, Artificial Sequence
  Synthetic
VRGDMLTGSSQYYYIMDV

SEQ ID NO: 6083 - protein, 107 aa, Artificial Sequence
  Synthetic
DIQMTQSPSSLSASVGDRVTITCRASQSISRYLNWYQQKPGKAPKLLIYAASSLQSGVPSRFSGSGSGTDFTLTISSLQPEDFATYSCQQSYSSMYTFGQGTKLEIK

SEQ ID NO: 6084 - protein, 9 aa, Artificial Sequence
  Synthetic
QQSYSSMYT

SEQ ID NO: 6085 - protein, 120 aa, Artificial Sequence
  Synthetic
QVQLVESGGGVVQPGRSLRLSCAASGFTFSSYGMHWVRQAPGKGLEWVALIGYDGTDKYYAENVKGRFTISRDNSKNTLFLQMNSLRGGDTAVYLCARDGIPFRYGMDVWGQGTTVTVSS

SEQ ID NO: 6086 - protein, 13 aa, Artificial Sequence
  Synthetic
ARDGIPFRYGMDV

SEQ ID NO: 6087 - protein, 107 aa, Artificial Sequence
  Synthetic
DIQMTQSPSTLSASVGDRVTITCRASQSIDIWLAWYQQKPGKAPKFLIHKASTLESGVPSRFSGSGSGTEFTLTISSLQPDDFATYYCQHYHSYSGTFGQGTKVEIK

SEQ ID NO: 6088 - protein, 9 aa, Artificial Sequence
  Synthetic
QHYHSYSGT

SEQ ID NO: 6089 - protein, 124 aa, Artificial Sequence
  Synthetic
EVQLVESGGGLVQPGGSLRLSCVASGFSFSDYSMNWVRQAPGKGLEWVSYISSSSSTIYYADSVKGRFTMSRDNAKNSLFLQMNSLRDEDTAVYYCARHWGPQKSYYYYGMDVWGPGTTVTVSS

SEQ ID NO: 6090 - protein, 17 aa, Artificial Sequence
  Synthetic
ARHWGPQKSYYYYGMDV

SEQ ID NO: 6091 - protein, 106 aa, Artificial Sequence
  Synthetic
DIQMTQSPSSLSASVGDRVTVTCRASQSINSYLNWYQQKPGKAPKLLIYGASNLQSGVPSRFSGSESGTEFTLTISSLQPEDFATYYCQQSYSTPPAFGQGTKVEI

SEQ ID NO: 6092 - protein, 9 aa, Artificial Sequence
  Synthetic
QQSYSTPPA

SEQ ID NO: 6093 - protein, 134 aa, Artificial Sequence
  Synthetic
QVQLVQSGAEVKKPGASVKLSCKASGYSFTSYYILWVRQAPGQGLEWMGIINPSGGATSFAQKFQGRVTLTRDTSTSTVYMELSSLRSEDTALYYCARDTGDSSGWYPPPILKYNYYYYGMDVWGQGTTVTVSS

SEQ ID NO: 6094 - protein, 27 aa, Artificial Sequence
  Synthetic
ARDTGDSSGWYPPPILKYNYYYYGMDV

SEQ ID NO: 6095 - protein, 107 aa, Artificial Sequence
  Synthetic
DIQMTQSPSSLSASVGDRVTITCRASQGIRNDLGWYQQKPGKAPKRLIYAASSLQSGVPSRFSGSGSGTEFTLTISSLQPEDFATYYCLQHNSYPRTFGQGTKVEIK

SEQ ID NO: 6096 - protein, 9 aa, Artificial Sequence
  Synthetic
LQHNSYPRT

SEQ ID NO: 6097 - protein, 130 aa, Artificial Sequence
  Synthetic
EVQLVESGGGLVQPGRSLRLSCVATGFTFDDFAMHWVRQAPGKGLEWVSGISWNGGIIGYVDSVKGRFTISRDNAKNSLYLQMNSLRPEDTALYYCVKGYRYYYDILTGYYNDAGAFDYWGQGTLVTVSS

SEQ ID NO: 6098 - protein, 23 aa, Artificial Sequence
  Synthetic
VKGYRYYYDILTGYYNDAGAFDY

SEQ ID NO: 6099 - protein, 107 aa, Artificial Sequence
  Synthetic
DIQLTQSPSFLSASVGDRVTITCRASQGISSYLAWYQQKPGKAPKLLIYPASTLQSGVPSGFSGSGSGTEFTLTISSLQPEDFATYYCQQLNDYPFTFGPGTKVDIK

SEQ ID NO: 6100 - protein, 9 aa, Artificial Sequence
  Synthetic
QQLNDYPFT

SEQ ID NO: 6101 - protein, 124 aa, Artificial Sequence
  Synthetic
QLQLQESGPGLVKPSETLSLTCTVSGGSISSRNYHWGWIRQTPGKGLEWIGSIYYSGSTYYNPSLKSRVTISVDTSKNQFSLKMRSVTAADTALYFCARLETSGWYTGDVFDIWGQGTMVTVSS

SEQ ID NO: 6102 - protein, 16 aa, Artificial Sequence
  Synthetic
ARLETSGWYTGDVFDI

SEQ ID NO: 6103 - protein, 107 aa, Artificial Sequence
  Synthetic
DIQMTQSPSSLSASVGDRVTITCRASQSISSYLNWYQQKPGKAPKLLIYAAVSLQSGVPSRFSGSGSGTDFTLTINSLQPEDFATYYCQRSYSAMYSFGQGTRLEIQ

SEQ ID NO: 6104 - protein, 9 aa, Artificial Sequence
  Synthetic
QRSYSAMYS

SEQ ID NO: 6105 - protein, 121 aa, Artificial Sequence
  Synthetic
EVQLVESGGRLVQPGRSLRLSCAASGFTFDDYAIHWVRQAPGKGLEWVSGISWNSGSIGYADSVRGRFTISRDNAKNSLYLQMNSLRAEDTALYYCAKGLDSSSSASPDYWGQGTLVTVSS

SEQ ID NO: 6106 - protein, 14 aa, Artificial Sequence
  Synthetic
AKGLDSSSSASPDY

SEQ ID NO: 6107 - protein, 107 aa, Artificial Sequence
  Synthetic
DIQMTQSPSSVSASVGDRVTITCRASQDISSWLAWYQQKPGKAPKLLIYLASSLQSGVPSRFSGSGSGTDFILTISSLQPEDFGTYYCQQGNSFPLTFGGGTKVEIK

SEQ ID NO: 6108 - protein, 9 aa, Artificial Sequence
  Synthetic
QQGNSFPLT

SEQ ID NO: 6109 - protein, 121 aa, Artificial Sequence; identical to SEQ ID NO: 453
  Synthetic

SEQ ID NO: 6110 - protein, 14 aa, Artificial Sequence
  Synthetic
ARDALTAISVRFDY

SEQ ID NO: 6111 - protein, 108 aa, Artificial Sequence; identical to SEQ ID NO: 454
  Synthetic

SEQ ID NO: 6112 - protein, 10 aa, Artificial Sequence
  Synthetic
QQSYSTPSVT

SEQ ID NO: 6113 - protein, 122 aa, Artificial Sequence
  Synthetic
QVQLVQSGAEVKKPGASVKVSCKASGYTFTSFYMHWVRQAPGQGLEWMGIINPSGGATTYAQKFQGRVTMTSDASTSTLYMELSSLRSDDTAVYYCTRDAGFIPTDNWFDPWGQGTLVTVSS

SEQ ID NO: 6114 - protein, 15 aa, Artificial Sequence
  Synthetic
TRDAGFIPTDNWFDP

SEQ ID NO: 6115 - protein, 111 aa, Artificial Sequence
  Synthetic
EIVLTQSPGTLSLSPGERATLSCRASQSVSSSYLAWYQQKPGQAPRLLIYGASSRATGIPDRFSGSGSGTDFTLTISRLEPEDFAVYYCQQYGRSALGMCSFGQGTKLEIK

SEQ ID NO: 6116 - protein, 12 aa, Artificial Sequence
  Synthetic
QQYGRSALGMCS

SEQ ID NO: 6117 - protein, 123 aa, Artificial Sequence
  Synthetic
  misc_feature (53)..(53): Xaa can be any naturally occurring amino acid
QVQLVESGGGVVQPGRSLRLSCAASGFTFSSYDMHWVRQAPGKGLEWVVVISXDGSSKFYADSVKGRFTISRDNSKNTLYLQMNSLRAEDTAVYYCARDPPGEISTTPVLDYWGQGTLVTVSS

SEQ ID NO: 6118 - protein, 16 aa, Artificial Sequence
  Synthetic
ARDPPGEISTTPVLDY

SEQ ID NO: 6119 - protein, 108 aa, Artificial Sequence
  Synthetic
DIQMTQSPSSLAASVGDRVTITCRASQSISNYLNWYQQKPGKAPNLLIYAASSLQSGVPSRFSGSGSGTDFTLTISSLQPEDFATYYCQQSYSTPPLTFGGGTKVEIK

SEQ ID NO: 6120 - protein, 10 aa, Artificial Sequence
  Synthetic
QQSYSTPPLT

SEQ ID NO: 6121 - protein, 124 aa, Artificial Sequence
  Synthetic
EVQLVESGGGLVKPGGSLRLSCAASGFTFSNAWMSWVRQAPGKGLEWVGHIKSKTDGGTTDYATPVKGRFTISRDDSKNTLYLQMNSLKSEDTAVYFCSTSDLIYYYSYGMDVWGQGTTVTVSS

SEQ ID NO: 6122 - protein, 15 aa, Artificial Sequence
  Synthetic
STSDLIYYYSYGMDV

SEQ ID NO: 6123 - protein, 108 aa, Artificial Sequence
  Synthetic
DIQMTQSPSTLSASVGDRVTITCRASQSISSWLAWYQQKPGKAPKLLIYKASTLQSGVPSRFSGSGSGTEFTLTISSLQPDDFATYYCQQYNSYSSYTFGQGTKLEIK

SEQ ID NO: 6124 - protein, 10 aa, Artificial Sequence
  Synthetic
QQYNSYSSYT

SEQ ID NO: 6125 - protein, 131 aa, Artificial Sequence
  Synthetic
QVQLVQSGAEVKKPGSSVRVSCKASGGTFSRNVISWVRQAPGQGLEWMGGIIPMFATANYAQKFQGRVTITADESSSTAYMELSSLRSEDTAVYYCAREDFILVSAPIRENSYYYYGMDVWGQGTTVTVSS

SEQ ID NO: 6126 - protein, 24 aa, Artificial Sequence
  Synthetic
AREDFILVSAPIRENSYYYYGMDV

SEQ ID NO: 6127 - protein, 108 aa, Artificial Sequence; identical to SEQ ID NO: 6003
  Synthetic

SEQ ID NO: 6128 - protein, 9 aa, Artificial Sequence
  Synthetic
QQYGGSPRT

SEQ ID NO: 6129 - protein, 129 aa, Artificial Sequence
  Synthetic
EVQLVESGGGLVKPGGSLRLSCAASGFPFTNAWMSWVRQAPGKGLEWVGHIKDYTDGGTTDYAAPVKGRFTISRDDSKNTLYLHMNSLKTEDTAVYYCSTVGSYYYDSRGPTSDAFDIWGQGTMVTVSS

SEQ ID NO: 6130 - protein, 20 aa, Artificial Sequence
  Synthetic
STVGSYYYDSRGPTSDAFDI

SEQ ID NO: 6131 - protein, 113 aa, Artificial Sequence
  Synthetic
DIVMTQSPDSLAMSLGERATINCKSSQSVLYSSNKKNYLAWYRQKPGQPPKLLIYWASTRESGVPDRFSGSGSGTDFTLTISSLQAEDVAVYYCQQYYSTPYTFGQGTKLEIK

SEQ ID NO: 6132 - protein, 9 aa, Artificial Sequence
  Synthetic
QQYYSTPYT

SEQ ID NO: 6133 - protein, 128 aa, Artificial Sequence
  Synthetic
QVQLVQSGAEVKKPGSSVKVSCKASGGTFNSYAISWVRQAPGQGLEWMGGIIPIFGTANYAQKFQGRVTITADESTGMAYMELSSLRSEDTAVYYCARVGAPMSRVRGYYYYYGMDVWGPGTTVTVSS

SEQ ID NO: 6134 - protein, 21 aa, Artificial Sequence
  Synthetic
ARVGAPMSRVRGYYYYYGMDV

SEQ ID NO: 6135 - protein, 111 aa, Artificial Sequence
  Synthetic
DIVMTQSPLSLPVTPGEPASISCRSSQSLLQSNGNSFLDWYLQKPGQSPQLLIYLGSNRASGVPDRFSGSGSGTDFTLKISRVEAEDVGVYYCMQALQRCSFGQGTKLEIK

SEQ ID NO: 6136 - protein, 8 aa, Artificial Sequence
  Synthetic
MQALQRCS

SEQ ID NO: 6137 - protein, 123 aa, Artificial Sequence; identical to SEQ ID NO: 423
  Synthetic

SEQ ID NO: 6138 - protein, 16 aa, Artificial Sequence
  Synthetic
AKDVPIEQQLVPTFDY

SEQ ID NO: 6139 - protein, 108 aa, Artificial Sequence; identical to SEQ ID NO: 424
  Synthetic

SEQ ID NO: 6140 - protein, 10 aa, Artificial Sequence
  Synthetic
QQSYSTLSIT

SEQ ID NO: 6141 - protein, 127 aa, Artificial Sequence
  Synthetic
EVQLLESGGGLVQPGGSLRLSCAASGFTFNNYAMNWVRQAPGRGLEWVSGISGSGANTYYADSVKGRFTISRDNPKNTLSLQMNSLRAEDTALYYCAKVLSPTYYDSWSGPDAFDFWGQGTMVTVTS

SEQ ID NO: 6142 - protein, 20 aa, Artificial Sequence
  Synthetic
AKVLSPTYYDSWSGPDAFDF

SEQ ID NO: 6143 - protein, 108 aa, Artificial Sequence
  Synthetic
DIQMTQSPSTLSASVGDRVTITCRASQTISPWLAWYQQKPGKAPNLLIYKASSLESGVPSRFSGSGSGTEFTLTISSLQPDDFATYYCQQYNSYSSWTFGQGTKVEIK

SEQ ID NO: 6144 - protein, 10 aa, Artificial Sequence
  Synthetic
QQYNSYSSWT

SEQ ID NO: 6145 - protein, 118 aa, Artificial Sequence
  Synthetic
QVQLQESGPGLVKSSETLSLSCTVSGGSISSHYWSWIRQPAGKALEWIGRLYTSGSTAYNPSLKSRVTMSVDTSKNQFSLKLTSVTAADTAVYYCAREPNYHYHGMDVWGQGTTVTVS

SEQ ID NO: 6146 - protein, 13 aa, Artificial Sequence
  Synthetic
AREPNYHYHGMDV

SEQ ID NO: 6147 - protein, 107 aa, Artificial Sequence
  Synthetic
DIQMTQSPSSVSASVGDRVTITCRASQGISSWLAWYQQKPGKAPKLLIYAASSLQSGVPSRFSGSGSGTDFTLTISSLQPEDFATYYCQQGNSFLLTFGGGTKVEIK

SEQ ID NO: 6148 - protein, 9 aa, Artificial Sequence
  Synthetic
QQGNSFLLT

SEQ ID NO: 6149 - protein, 122 aa, Artificial Sequence
  Synthetic
QVQLVQSGAEVKKPGASVKVSCKASGYTFTDSYMHWVRQAPGQGLEWMGIINPSGGSTTYAQKFQGRVTMTRDTSTSKVYMELSSLRSEDTAVYYCARDAFYIPAGGWFDPWGQGTLVTVSS

SEQ ID NO: 6150 - protein, 15 aa, Artificial Sequence
  Synthetic
ARDAFYIPAGGWFDP

SEQ ID NO: 6151 - protein, 108 aa, Artificial Sequence
  Synthetic
EIVLTQSPGTLSLSPGERATLSCRASQSVSSSYFAWYQQKPGQAPRLLIYGASSRATGIPDRFSGSGSGTDFTLTISRLEPEDVAVYYCQQYGSSSRTFGQGTKVEIK

SEQ ID NO: 6152 - protein, 9 aa, Artificial Sequence
  Synthetic
QQYGSSSRT

SEQ ID NO: 6153 - protein, 122 aa, Artificial Sequence; identical to SEQ ID NO: 399
  Synthetic

SEQ ID NO: 6154 - protein, 15 aa, Artificial Sequence
  Synthetic
ARDIVFVPATMAMDV

SEQ ID NO: 6155 - protein, 107 aa, Artificial Sequence; identical to SEQ ID NO: 400
  Synthetic

SEQ ID NO: 6156 - protein, 9 aa, Artificial Sequence
  Synthetic
QQRSNWLFT

SEQ ID NO: 6157 - protein, 120 aa, Artificial Sequence
  Synthetic
QVQLVQSGAEVKKPGSSVKVSCKASGDTSSSYGINWVRQAPGQGLEWMGEIIPMFETTNYAQKFQGRVTITADESTSTAYMELSSLRSEDTAVYYCARDPGYGNHDLDFWGQGTLVTVSS

SEQ ID NO: 6158 - protein, 13 aa, Artificial Sequence
  Synthetic
ARDPGYGNHDLDF

SEQ ID NO: 6159 - protein, 103 aa, Artificial Sequence
  Synthetic
DIQMTQSPSSLSASVGDRVTITCRASQGISSWLAWYQQKPGKAPKLLIYSASSLQSGVPSRFSGSGSGTNFTLTISSLQPEDFATYYCQQARTFGPGTKVDIK

SEQ ID NO: 6160 - protein, 5 aa, Artificial Sequence
  Synthetic
QQART

SEQ ID NO: 6161 - protein, 118 aa, Artificial Sequence
  Synthetic
EVQLVESGGGLVQPGGSLRLSCTASGFIVSSNYMSWVRQAPGKGLEWVSVLYSGGSTFYADSVKGRFTISRDNSKNTLYLQMNSLRSDDTAVYYCARDLRGPGKFDYWGQGTLVSVSS

SEQ ID NO: 6162 - protein, 12 aa, Artificial Sequence
  Synthetic
ARDLRGPGKFDY

SEQ ID NO: 6163 - protein, 108 aa, Artificial Sequence
  Synthetic
DIQMTQSPSSLSASVGDRVTITCQASQGISNSLNWYQQKPGKAPKLLIYDASNLETGVPSRFSGSGSGTDFTFTISSLQPEDIATYYCQQYDNLPEVTFGQGTRLEIK

SEQ ID NO: 6164 - protein, 10 aa, Artificial Sequence
  Synthetic
QQYDNLPEVT

SEQ ID NO: 6165 - protein, 127 aa, Artificial Sequence
  Synthetic
QVQLQESGPGLVKPSETLSLTCSVSGGSIFTHCWSWIRQPPGKGLEWIGNIYFSGKTNYNASLKSRVTISVDTSKNQFSLKLSSVTTADTAVYYCARALTYNDILTGGEYFNGMDVWGQGTTVTVSS

SEQ ID NO: 6166 - protein, 21 aa, Artificial Sequence
  Synthetic
ARALTYNDILTGGEYFNGMDV

SEQ ID NO: 6167 - protein, 107 aa, Artificial Sequence
  Synthetic
DIQMTQSPSSLSASVGDRVTITCRASQDIRNDLGWYHQKPGKAPRRLIYAASSLQSGVPSRFSGSGSGTEFTLTISSLQPEDFATYYCLQHNSYPWTFGQGTKVEIK

SEQ ID NO: 6168 - protein, 9 aa, Artificial Sequence
  Synthetic
LQHNSYPWT

SEQ ID NO: 6169 - protein, 117 aa, Artificial Sequence
  Synthetic
EVQLVESGGGLIQPGGSLRLSCAASGVIVRSNYMSWVRQAPGKGLEWVALIYSGGTTDYADSVKGRFTISRDNSKNTLYLQMDSLRAEDTAVYYCARDLIVYGMDVWGQGTTVTVSS

SEQ ID NO: 6170 - protein, 11 aa, Artificial Sequence
  Synthetic
ARDLIVYGMDV

SEQ ID NO: 6171 - protein, 108 aa, Artificial Sequence
  Synthetic
DIQLTQSPSFLSASVGDRVTITCRASQGISSFLAWYQQKPGKAPKLLIYGASTLQSGVPSRFSGSGSGTEFTLTISSLQPEDFATYYCQQLNSYPMCSFGQGTKLEIK

SEQ ID NO: 6172 - protein, 10 aa, Artificial Sequence
  Synthetic
QQLNSYPMCS

SEQ ID NO: 6173 - protein, 124 aa, Artificial Sequence
  Synthetic
QVQLVQSGAEVKKPGASVKVSCKASGYPFSRYYIHWVRQAPGQGLEWMGIINPSGGSTTYAQRFQGRVTMTRDTSASTVYLDLSSLGSEDSAVYYCARPLLPGETGNLNRLDYWGQGTLVTVSS

SEQ ID NO: 6174 - protein, 17 aa, Artificial Sequence
  Synthetic
ARPLLPGETGNLNRLDY

SEQ ID NO: 6175 - protein, 107 aa, Artificial Sequence
  Synthetic
  misc_feature (45)..(45): Xaa can be any naturally occurring amino acid
DIQMTQSPSSLSASVGDRVTITCRASQSISSYLNWYQQKPGIAPXLLIYGASSLQSGVPSRFSGSGSGTDFTLTISSVQPDDFATYYCQQSYSTLWTFGQGTKVEIK

SEQ ID NO: 6176 - protein, 9 aa, Artificial Sequence
  Synthetic
QQSYSTLWT

SEQ ID NO: 6177 - protein, 115 aa, Artificial Sequence; identical to SEQ ID NO: 433
  Synthetic

SEQ ID NO: 6178 - protein, 11 aa, Artificial Sequence
  Synthetic
ARDFREGAFDI

SEQ ID NO: 6179 - protein, 107 aa, Artificial Sequence; identical to SEQ ID NO: 434
  Synthetic

SEQ ID NO: 6180 - protein, 9 aa, Artificial Sequence
  Synthetic
QQLNSYSPL

SEQ ID NO: 6181 - protein, 127 aa, Artificial Sequence
  Synthetic
QVQLQESGPGLVKPSQTLSLTCTVSGGSISSGGYYWSWIRQHPGKGLEWIGYIYYSGSGSTYYNPSLKSRVIISVDTSKNHFSLKLNSVTAADTAVYYCARDRPNYYFDSRDAFDIWGQGTMVTVSS

SEQ ID NO: 6182 - protein, 17 aa, Artificial Sequence
  Synthetic
ARDRPNYYFDSRDAFDI

SEQ ID NO: 6183 - protein, 113 aa, Artificial Sequence
  Synthetic
DIVMTQSPDSLAVSLGERATINCKSGQSLLYSSNNKNYLAWYQQKPGQPPKLLIYWASTRESGVPDQFSGSGSGTDFTLTISSLQAEDVAVYYCQQYYSTPRTFGQGTKVEIK

SEQ ID NO: 6184 - protein, 9 aa, Artificial Sequence
  Synthetic
QQYYSTPRT

SEQ ID NO: 6185 - protein, 121 aa, Artificial Sequence
  Synthetic
EVQLVESGGGLVQPGRSLRLSCAASGFTFDDYALHWVRQAPGKGLEWVSGISWNGDSIGYADSVKGRFTISRDNAKNSLSLQMNSLTAEDTAFYYCARGVEYSSSSNCDFWGQGTLVTVSS

SEQ ID NO: 6186 - protein, 14 aa, Artificial Sequence
  Synthetic
ARGVEYSSSSNCDF

SEQ ID NO: 6187 - protein, 106 aa, Artificial Sequence
  Synthetic
DIQMTQSPSSVSASVGDRVTITCRASQGISSWLAWYQQKPGKAPKLLIYAASSLQSGVPSRFSGSGSETDFTLTISSLQPEDFATYYCQQTNSFPLTFGGGTKVEI

SEQ ID NO: 6188 - protein, 9 aa, Artificial Sequence
  Synthetic
QQTNSFPLT

SEQ ID NO: 6189 - protein, 118 aa, Artificial Sequence
  Synthetic
EVQLVESGGGLAQPGRSLRLSCAASGFMFDDYTMHWVRQAPGKGLEWVSGISWNSENIGYADSVKGRFTISRDNAKNSLFLQINSLRADDTAFYYCVREEVGGWFDPWGQGTLVAVSS

SEQ ID NO: 6190 - protein, 11 aa, Artificial Sequence
  Synthetic
VREEVGGWFDP

SEQ ID NO: 6191 - protein, 113 aa, Artificial Sequence; identical to SEQ ID NO: 6063
  Synthetic

SEQ ID NO: 6192 - protein, 10 aa, Artificial Sequence
  Synthetic
SQSTHVPPWT

SEQ ID NO: 6193 - protein, 123 aa, Artificial Sequence
  Synthetic
QVQLVESGGGVVQPGRSLRLSCAASGFTFSSYGMHWVRQAPGKGLEWVAVIWYDGSYKHYADSVKGRFAISRDNSKNTLHLQMNSLRAEDTAVYYCARDSNVDTVMVTWFDYWGQGTLVTVSS

SEQ ID NO: 6194 - protein, 16 aa, Artificial Sequence
  Synthetic
ARDSNVDTVMVTWFDY

SEQ ID NO: 6195 - protein, 107 aa, Artificial Sequence
  Synthetic
DIQMTQSPSSLSASVGDRVTITCRASQSISSYLNWYQQKPGKAPKLLIYVASSLQSGVPSRFSGSGSGTDFTLTISSLQPEDFATYYCQQSYSTPPWTFGQGTKVEI

SEQ ID NO: 6196 - protein, 10 aa, Artificial Sequence
  Synthetic
QQSYSTPPWT

SEQ ID NO: 6197 - protein, 124 aa, Artificial Sequence
  Synthetic
EVQLVESGGGLVQPGGSLRLSCAASGFTFSSDDMHWVRQATGKGLEWVSAIGTSGDTYYSGSVKGRFTISRENAKNSFYLQMNSLRAGDTAVYYCARGVITSLDGNYYYYMDVWGQGTTVTVSS

SEQ ID NO: 6198 - protein, 18 aa, Artificial Sequence
  Synthetic
ARGVITSLDGNYYYYMDV

SEQ ID NO: 6199 - protein, 108 aa, Artificial Sequence
  Synthetic
DIQMTQSPSSLSASVGDRVTITCRASQNIRFYLNWYQQKPGKAPNLLIYAASNLQSGVPSRFSGGGSGTDFTLTISSLQPEDFATYYCQQSYSSPPWTFGPGTKVEIK

SEQ ID NO: 6200 - protein, 10 aa, Artificial Sequence
  Synthetic
QQSYSSPPWT

SEQ ID NO: 6201 - protein, 128 aa, Artificial Sequence
  Synthetic
QVQLVQSGAELKKPGSSLKVSCKASGGTFSSSAISWVRQAPGQGLEWMGGIIPSLTTANYAQRFQDKVTITADISTSTVYMELSSLRSEDTAIYYCAKGPRLHDSLWGSFRFDAFDIWGQGTMVTVSS

SEQ ID NO: 6202 - protein, 21 aa, Artificial Sequence
  Synthetic
AKGPRLHDSLWGSFRFDAFDI

SEQ ID NO: 6203 - protein, 113 aa, Artificial Sequence
  Synthetic
DIVMTQTPLSLPVTPGEPASISCRSSQSLLDSDYGNTYLDWYLQKPGQSPQLLIYTLSYRASGVPDRFSGSGSGTDFTLKISRVEAEDVGVYYCMQRMDFPYSFGQGTKLEIK

SEQ ID NO: 6204 - protein, 9 aa, Artificial Sequence
  Synthetic
MQRMDFPYS

SEQ ID NO: 6205 - protein, 129 aa, Artificial Sequence
  Synthetic
EVQLVESGGGLVKPGGSLRLSCAASGFPFTNAWMSWVRQAPGKGLEWVGHIKDYTDGGTTDYAAPVKGKFTISRDDSKNTLYLHMNSLKTEDTAVYYCSTVGSYYYDSRGPTSDAFDIWGQGTMVTVSS

SEQ ID NO: 6206 - protein, 20 aa, Artificial Sequence
  Synthetic
STVGSYYYDSRGPTSDAFDI

SEQ ID NO: 6207 - protein, 113 aa, Artificial Sequence
  Synthetic
DIVMTQSPDSLAVSLGERATINCKSSQSVLYSSNKKNYLAWYRQKPGQPPKLLIYWASTRESGVPDRFSGSGSGTDFTLTISSLQAEDVAVYYCQQYYSTPYTFGQGTKLEIK

SEQ ID NO: 6208 - protein, 9 aa, Artificial Sequence
  Synthetic
QQYYSTPYT

SEQ ID NO: 6209 - protein, 120 aa, Artificial Sequence
  Synthetic
QVQLVESGGGMVQPGRSLRLSCAASGFTFNNYAMHWVRQALGKGPEWVAAISSDGRTKTYTDSVKGRFTISRDNSENTLYLQMNSVRAEDTALYYCAKDSVGIVDYFDYWGQGTLVTVSS

SEQ ID NO: 6210 - protein, 13 aa, Artificial Sequence
  Synthetic
AKDSVGIVDYFDY

SEQ ID NO: 6211 - protein, 108 aa, Artificial Sequence
  Synthetic
DIQMTQSPSSLSASVGDRVTITCRASQIISNYLNWYQQKPGKAPKLLIFAASSLQSGVPSRFSASGSGTDFTLTISSLQPEDFATYYCQQSYSTPPYTFGQGTKLEIK

SEQ ID NO: 6212 - protein, 10 aa, Artificial Sequence
  Synthetic
QQSYSTPPYT

SEQ ID NO: 6213 - protein, 120 aa, Artificial Sequence
  Synthetic
EVQLVQSGAEVKKPGESLKISCKGSGYRFTNYWIGWVRQMPGKGLEWIGNIFPGDSDSRYSPSFQGQVTISVDMSITTAYLHWSSLKASDTAIYYCARLSERWYSPFDSWGQGTLVTVSS

SEQ ID NO: 6214 - protein, 13 aa, Artificial Sequence
  Synthetic
ARLSERWYSPFDS

SEQ ID NO: 6215 - protein, 110 aa, Artificial Sequence
  Synthetic
EIVMTQSPATLSVSPGERATLSCRASQSVSSNLAWYQQKPGQAPRLLIYGASTRATGFPARFSGSGSGTEFTLTISSLQSEDFAVYFCQQYNNWPPGGFTFGPGTKVDIK

SEQ ID NO: 6216 - protein, 12 aa, Artificial Sequence
  Synthetic
QQYNNWPPGGFT

SEQ ID NO: 6217 - protein, 130 aa, Artificial Sequence
  Synthetic
EVQLVESGGGLVKPGGSLRLSCAASGLTFSHAWMSWVRQAPGKGLEWVGRIKSKIDGGTTDYAAPVKGRFTISRDDSKSTQYLQMNSLKTEDTAVYYCTTDCFWRLRGTSCYEHDAFDIWGQGTMVTVSS

SEQ ID NO: 6218 - protein, 21 aa, Artificial Sequence
  Synthetic
TTDCFWRLRGTSCYEHDAFDI

SEQ ID NO: 6219 - protein, 106 aa, Artificial Sequence
  Synthetic
DIQMTQSPSSLSASVGDRVTITCRASQTIASFLNWYQQKPGKAPKLLIYAASSLQSGVPSRFSGSGSGTDFTLTISSLQPEDFATYYCQQSYNSLHFGGGTQVEIK

SEQ ID NO: 6220 - protein, 8 aa, Artificial Sequence
  Synthetic
QQSYNSLH

SEQ ID NO: 6221 - protein, 124 aa, Artificial Sequence
  Synthetic
EVQLVQSGAEVKKPGESLKISCKVSGYTFTNYWIGWVRQMPGKGLEWMGIIFPGDSDTRYSPSFQGQVTISADRSITTAYLQWRSLKASDTAMYYCARVPSSSDYGDYGGFEYWGQGTLVTVSS

SEQ ID NO: 6222 - protein, 17 aa, Artificial Sequence
  Synthetic
ARVPSSSDYGDYGGFEY

SEQ ID NO: 6223 - protein, 107 aa, Artificial Sequence
  Synthetic
DIQMTQSPSSLSASVGDRVTITCRASQTITIYLNWYQQKPGKAPKLLIYAASSLQSGVPSRFSGSGSGTDFTLTISSLQPEDFATYYCQQSYSTPCSFGQGTKLEIK

SEQ ID NO: 6224 - protein, 9 aa, Artificial Sequence
  Synthetic
QQSYSTPCS

SEQ ID NO: 6225 - protein, 123 aa, Artificial Sequence
  Synthetic
QVQLVESGGGVVQPGKSLRLSCAASGFTFRSYAMHWVRQAPGKGLEWVAVIWDDGSSKHYSDSVKGHFTISRDNSKNTLYLQMNSLRAEDTAVYYCARDSNVDTVMVTWFDYWGQGTLVTVSS

SEQ ID NO: 6226 - protein, 16 aa, Artificial Sequence
  Synthetic
ARDSNVDTVMVTWFDY

SEQ ID NO: 6227 - protein, 108 aa, Artificial Sequence
  Synthetic
DIQMTQSPSSLSASVGDRVTITCRASQSISNYLNWYQQKPGKAPNLLIYTASSLQSGVPSRFSGSGSGTDFTLTISSLQPEDFATYYCQQSYSTPPWTFGQGTKVEIK

SEQ ID NO: 6228 - protein, 10 aa, Artificial Sequence
  Synthetic
QQSYSTPPWT

SEQ ID NO: 6229 - protein, 125 aa, Artificial Sequence
  Synthetic
QVQLQQWGAGLLKPSATLSLTCAVYGASFSGYSWSWIRQPPGRGLEWVGEINHSGGTNYNPSLKSRVTISADTSKNQFSLKLSSVTAADTAVYYCATTRSELRYFGYNYYGVDVWGQGTAVSVSS

SEQ ID NO: 6230 - protein, 19 aa, Artificial Sequence
  Synthetic
ATTRSELRYFGYNYYGVDV

SEQ ID NO: 6231 - protein, 107 aa, Artificial Sequence
  Synthetic
DIQMTQSPSSLSASVEDRVTITCRASQGIRNDLGWYQQKPGKAPKRLIYAASSLQSGVPSRFSGSGSGTEFTLTISSLQPEDSATYYCLQYNTYPRTFGQGTKVEIK

SEQ ID NO: 6232 - protein, 9 aa, Artificial Sequence
  Synthetic
LQYNTYPRT

SEQ ID NO: 6233 - protein, 125 aa, Artificial Sequence
  Synthetic
QVQLVESGGGVVLPGRSLRLSCAASGLTFSTYGMHWVRQAPGKGLEWVAVISNDGSNKYYADSVKGRFTISRDNSKNTLYLQMNSLRAEDTALYYCAKDFFMYYSGWYRYYIDYWGQGTLVTVSS

SEQ ID NO: 6234 - protein, 18 aa, Artificial Sequence
  Synthetic
AKDFFMYYSGWYRYYIDY

SEQ ID NO: 6235 - protein, 107 aa, Artificial Sequence
  Synthetic
DIQMTQSPSSLSASLGDRVTITCQASQDISNFLNWYQQKPGRAPKLLIYDASNLETGVPSRFSGSGSGTDFTFTISSLQPEDIATYYCQQYDNLPLTFGGGTKVEIK

SEQ ID NO: 6236 - protein, 9 aa, Artificial Sequence
  Synthetic
QQYDNLPLT

SEQ ID NO: 6237 - protein, 117 aa, Artificial Sequence
  Synthetic
EVQLVESGGGLIQRGGSLRLSCAASGLTVSSNYMTWVRQAPGTGLEWVSVIYSGGSTFYADSVKGRFTISRDNSKNTLYLQMNSLRPEDTAVYYCARDRGESGLDVWGQGTTVTVSS

SEQ ID NO: 6238 - protein, 11 aa, Artificial Sequence
  Synthetic
ARDRGESGLDV

SEQ ID NO: 6239 - protein, 106 aa, Artificial Sequence
  Synthetic
DIQMTQSPSFVSASVGDRVTITCRASQGISRWLAWYQQKPGKAPKLLIYAASSLQSGVPSRFSGSGSGTDFTLTISSLQPEDFATYYCQQANSFPLFGGGTKVEIK

SEQ ID NO: 6240 - protein, 8 aa, Artificial Sequence
  Synthetic
QQANSFPL

SEQ ID NO: 6241 - protein, 122 aa, Artificial Sequence
  Synthetic
QVQLVQSGAEVKKPGASVKVSCKASGYTFTGSYMHWVRQAPGQGLEWMGWINPNSGGTNYAQKFQGRVTMTRDTSISTAYMELSSLRSDDTAVYFCARFGSGWQWLGKTDVWGQGTTVTVSS

SEQ ID NO: 6242 - protein, 15 aa, Artificial Sequence
  Synthetic
ARFGSGWQWLGKTDV

SEQ ID NO: 6243 - protein, 108 aa, Artificial Sequence
  Synthetic
DIQMTQSPSSLSASVGDRVTITCQASQDISTYLNWYQQKPGKAPKLLIYDASNLETGVPSRFSGSGSGTDFTFTISSLQPEDIATYYCQQYDNLPQYTFGQGTKLEIK

SEQ ID NO: 6244 - protein, 10 aa, Artificial Sequence
  Synthetic
QQYDNLPQYT

SEQ ID NO: 6245 - protein, 121 aa, Artificial Sequence
  Synthetic
EVQLVESGGGLVQPGRSLRLSCAASGFTFDDYALHWVRQAPGKGLEWVSGISWNGDSIGYADSVKGRFTISRDNAKNSLSLQMNSLTAEDTALYYCAKGVEYSSSSNCDYWGQGTLVTVSS

SEQ ID NO: 6246 - protein, 14 aa, Artificial Sequence
  Synthetic
AKGVEYSSSSNCDY

SEQ ID NO: 6247 - protein, 106 aa, Artificial Sequence
  Synthetic
DIQMTQSPSSVSASVGDRVTITCRASQDISSWLAWYQQKPGKAPKLLISLASGLQSGVPSRFSGSGSETDFTLTISSLQPEDFATYYCQQTNSFPLTFGGGTKVEI

SEQ ID NO: 6248 - protein, 9 aa, Artificial Sequence
  Synthetic
QQTNSFPLT

SEQ ID NO: 6249 - protein, 116 aa, Artificial Sequence; identical to SEQ ID NO: 413
  Synthetic

SEQ ID NO: 6250 - protein, 11 aa, Artificial Sequence
  Synthetic
ARRGASWELDY

SEQ ID NO: 6251 - protein, 110 aa, Artificial Sequence; identical to SEQ ID NO: 414
  Synthetic

SEQ ID NO: 6252 - protein, 11 aa, Artificial Sequence
  Synthetic
AAWDDSLNGYV

SEQ ID NO: 6253 - protein, 126 aa, Artificial Sequence
  Synthetic
QVQLVQSGAEVKKPGSSVKVSCKASGGTFSTSAISWVRQAPGQGLEWMGGIIPFFGTPNYAQKFQGRVTIIADESTTTAYMELSGLRFEDSAVYYCARREPYGPRDYYYFFGMDVWGPGTTVTVSS

SEQ ID NO: 6254 - protein, 19 aa, Artificial Sequence
  Synthetic
ARREPYGPRDYYYFFGMDV

SEQ ID NO: 6255 - protein, 115 aa, Artificial Sequence
  Synthetic
QSVLTQPPFASASLGASVTLTCTLSSDYSYYKVDWYQQRPGKGPRFVIRVGPGGIVGSKGDGFPDRFSVLGSGLNRSLTINNIQEEDEGDYHCGADEGSGGTFVGVFGGGTKLTV

SEQ ID NO: 6256 - protein, 13 aa, Artificial Sequence
  Synthetic
GADEGSGGTFVGV

SEQ ID NO: 6257 - protein, 120 aa, Artificial Sequence
  Synthetic
QVQLVESGGGVVQPGRSLRLSCAASGFTFSNYEIHWVRQAPGKGLEWVAGISYDGSTKYYADSVKGRFTISRDNSKNTLYLQMNSLRPEDTAVFYCARAGTTNSDYFDYWGQGTLVTVSS

SEQ ID NO: 6258 - protein, 13 aa, Artificial Sequence
  Synthetic
ARAGTTNSDYFDY

SEQ ID NO: 6259 - protein, 108 aa, Artificial Sequence
  Synthetic
SYVLTQPPSVSVAPGMTARITCGGNTIGSKSVHWYQQKAGQAPVLVIYYDSDRPSGIPERFSGSNSGNTATLTISRVEAGDEADYYCQVWDSSSVLWVFGGGTKLTVL

SEQ ID NO: 6260 - protein, 11 aa, Artificial Sequence
  Synthetic
QVWDSSSVLWV

SEQ ID NO: 6261 - protein, 122 aa, Artificial Sequence
  Synthetic
QVQLVQSGAEVKKPGASVKVSCKASGYTFTSHGINWVRQAPGQGLEWMGWISTYSGNTKYAQKFQGRVTMTTDTSTSTVYMELRSLRSDDAAVYYCARDPPNDILTGYLDHWGQGTLVTVSS

SEQ ID NO: 6262 - protein, 15 aa, Artificial Sequence
  Synthetic
ARDPPNDILTGYLDH

SEQ ID NO: 6263 - protein, 109 aa, Artificial Sequence
  Synthetic
SYVLTQPPSVSAAPGKTAGITCGGDSIGGKSVHWYQQKPGQAPVLVVYDDSDRPSGIPERFSGSNSGNTATLTISRVEAGDEADYYCQVWDGSSDRHWVFGGGTKLTVL

SEQ ID NO: 6264 - protein, 12 aa, Artificial Sequence
  Synthetic
QVWDGSSDRHWV

SEQ ID NO: 6265 - protein, 119 aa, Artificial Sequence
  Synthetic
QVQLVQSGAEVKKPGASVKVSCKASGYTFSSHDINWVRQATGQGLEWVGWMNPNSGNTGSAQSFQGRVTLTRNASISTAYLELSSLRSEDTAVYFCARGFSLTWYFDLWGRGTLITVSS

SEQ ID NO: 6266 - protein, 12 aa, Artificial Sequence
  Synthetic
ARGFSLTWYFDL

SEQ ID NO: 6267 - protein, 110 aa, Artificial Sequence
  Synthetic
SYVLTQPPSVSAAPGKTARITCGGNNIGGKNVHWYQQKPGQAPVLVVFDDSDRPSGIPERFSGSNSGNTATLTISRVEAGDEADYYCQLWDSTSDHPDVVFGGGTQLTVL

SEQ ID NO: 6268 - protein, 13 aa, Artificial Sequence
  Synthetic
QLWDSTSDHPDVV

SEQ ID NO: 6269 - protein, 119 aa, Artificial Sequence
  Synthetic
QVQLVQSGAEVKKPGASVKVSCKASGYTFTSYSIHWMRQAPGQGLEWTGIINPSGGGTSYAKKFQGRVTMTRDTSTNTVYMELSSLRSEDTAVYYCAREGSLTGYFDLWGRGTLVTVSS

SEQ ID NO: 6270 - protein, 12 aa, Artificial Sequence
  Synthetic
AREGSLTGYFDL

SEQ ID NO: 6271 - protein, 109 aa, Artificial Sequence
  Synthetic
SYVLTQPPSVSVAPGKTARITCGGNNIGSKSVHWYQQKPGQAPILVVYDDSDRPSGIPERFSGSNSGNTATLTISRVEAGDEADYYCQVWDSSSDRHVVFGGGTKLTVL

SEQ ID NO: 6272 - protein, 12 aa, Artificial Sequence
  Synthetic
QVWDSSSDRHVV

SEQ ID NO: 6273 - protein, 120 aa, Artificial Sequence
  Synthetic
EVQLVESGGGLVKPGGSLRLSCAASGFTFSDYSMTWVRQAPGKGLEWVSFISSSSTYIYYADSVKGRFTISRDNAKSSLYLQMNRLRAEDTAVYYCTRVQVGARGWADYWGQGTLVTVSS

SEQ ID NO: 6274 - protein, 13 aa, Artificial Sequence
  Synthetic
TRVQVGARGWADY

SEQ ID NO: 6275 - protein, 110 aa, Artificial Sequence
  Synthetic
NFMLTQPLSVSESPGKTVTISCTRSSGSIASNYVQWYQQRPGGAPTTVIYEDTQRPSGVPDRFSGSIDSSSNSASLTISGLKTEDEADYYCQSCDTINWVFGGGTKLTVV

SEQ ID NO: 6276 - protein, 9 aa, Artificial Sequence
  Synthetic
QSCDTINWV

SEQ ID NO: 6277 - protein, 129 aa, Artificial Sequence
  Synthetic
QVQLVESGGGVAQPGRSLRLSCAASGFTFSRYGMHWVRQAPGKGLEWVAVIWHDGSDKYCADFVKGRFTISRDNSKNTLYMQMDSLRAEDTAVYYCARGGRPDHETGIAVLGEYYFDSWGQGTLVTVSS

SEQ ID NO: 6278 - protein, 22 aa, Artificial Sequence
  Synthetic
ARGGRPDHETGIAVLGEYYFDS

SEQ ID NO: 6279 - protein, 106 aa, Artificial Sequence
  Synthetic
SYVLTQPPSVSVSPGQTARITCSGDAFPLQYGYWYQQKPGQAPVLVIYKDKERPSGISERFSGSSSGTTVTLTISGVQAEDEADYYCQSADTNGVVFGGGTSLTVL

SEQ ID NO: 6280 - protein, 9 aa, Artificial Sequence
  Synthetic
QSADTNGVV

SEQ ID NO: 6281 - protein, 124 aa, Artificial Sequence
  Synthetic
QVQLVQSGAEVKKPGSSVKVSCKASGGTFSMSAISWVRQAPGQGLEWMGGIIPIFGTPNYAQKFQGRVTIAADESTSTAYMELSSLRSEDTAVYYCARDQNQIDPAYRDAFDIWGQGTMVTVSS

SEQ ID NO: 6282 - protein, 17 aa, Artificial Sequence
  Synthetic
ARDQNQIDPAYRDAFDI

SEQ ID NO: 6283 - protein, 110 aa, Artificial Sequence
  Synthetic
QSVLTQPASVSGSPGQSITISCTGTSSDVGSYNLVSWYQQHPGKAPKLMIYEGSKRPSGVSNRFSGSKSGNTASLTISGLQAEDEADYYCCSYAGSSSWVFGGGTKLTVL

SEQ ID NO: 6284 - protein, 10 aa, Artificial Sequence
  Synthetic
CSYAGSSSWV

SEQ ID NO: 6285 - protein, 118 aa, Artificial Sequence
  Synthetic
QVQLQQWGAGLLKPSETLSLTCAVYGGSLSAYQWIWIRQSPGKGLEWIGEINHSGGSNCNPSLKTRVTMSVDTSKNQFSLRLSSVTAADTGVYYCARVQDLMYSLLYWGQGTLVIVSS

SEQ ID NO: 6286 - protein, 12 aa, Artificial Sequence
  Synthetic
ARVQDLMYSLLY

SEQ ID NO: 6287 - protein, 110 aa, Artificial Sequence
  Synthetic
SYVLTQPPSVSVAPGQTARITCGGNNIGSKNVHWYQQKPGQAPVLVVYDDSDRPSGIPERFSGSNSGNTATLSISRVEAGDEADYYCQVWDSTSDHPGVVFGGGTKLTVL

SEQ ID NO: 6288 - protein, 13 aa, Artificial Sequence
  Synthetic
QVWDSTSDHPGVV

SEQ ID NO: 6289 - protein, 128 aa, Artificial Sequence
  Synthetic
QVQLVQSGAEVKKSGASVKVSCKASGYSFTDYFMHWVRQAPGQGLEWMGWINPNSGGTNYAQKFQGRVTMTRDTSITTAYMELSRLRSDDTAVYYCARTPAPLRHVENYYYYYGLDVWGQGTTVTVSS

SEQ ID NO: 6290 - protein, 21 aa, Artificial Sequence
  Synthetic
ARTPAPLRHVENYYYYYGLDV

SEQ ID NO: 6291 - protein, 111 aa, Artificial Sequence
  Synthetic
QSVLTQPASVSGSPGQSITISCTGTASDVGGYNYVSWYQHHPGKAPTLMIYDVSNRPSGVSNRFSGSKSGNTASLTISGLQAEDEADYYCSSYTRGTTLVLFGGGTTLTVL

SEQ ID NO: 6292 - protein, 11 aa, Artificial Sequence
  Synthetic
SSYTRGTTLVL

SEQ ID NO: 6293 - protein, 122 aa, Artificial Sequence
  Synthetic
QVQLQESGPGLVKPSQTLSLTCTVSGGSISNGDYYWSWIRQHPGKGLEWIGYIYHSGITYYNPSLKSRLMISIDTSKNQFSLKLRSVTAADTAVYYCARFLRNFEWLFFDPWGQGTLVTVSS

SEQ ID NO: 6294 - protein, 14 aa, Artificial Sequence
  Synthetic
ARFLRNFEWLFFDP

SEQ ID NO: 6295 - protein, 109 aa, Artificial Sequence
  Synthetic
QSVLTQPPSASGSPGQSVTISCTGTSSDVGGYDYVSWYQHHPGKAPKVMIYEVRKRPSGVPDRFSGSKSGNTASLTVSGLQAEDEADYYCSSYVGSNVLFGGGTKLTVL

SEQ ID NO: 6296 - protein, 9 aa, Artificial Sequence
  Synthetic
SSYVGSNVL

SEQ ID NO: 6297 - protein, 123 aa, Artificial Sequence
  Synthetic
QVQLQESGPGLVKPSETLSLTCTVSGASISSHYWSWIRQPPGKGLEWIGYIHYIGSTNYNPSLKSRVTILLDTSKNQFSLRLRSVTAADTAVYYCARGWPYCGVDCYSGFDYWGQGTLVTVSS

SEQ ID NO: 6298 - protein, 17 aa, Artificial Sequence
  Synthetic
ARGWPYCGVDCYSGFDY

SEQ ID NO: 6299 - protein, 111 aa, Artificial Sequence
  Synthetic
QSVLTQPPSASGTPGQRVTISCSGSSSNIGSNTVNWYQQLPGTAPKLLIYSNNQRPSGVPDRFSGSKSGTSASLAISGLQSEDEADYYCAAWDDSLNGLWVFGGGTKLTVL

SEQ ID NO: 6300 - protein, 12 aa, Artificial Sequence
  Synthetic
AAWDDSLNGLWV

SEQ ID NO: 6301 - protein, 124 aa, Artificial Sequence
  Synthetic
QVQLVQSGAEVKKPGASVKVSCEASGFPFINYFMHWVRQAPGQGLEWMGVINPGGGSTTYPQKFQGRVTMTRDTSTSTVYMELSSLRSEDTAVYYCARGRSRGVGDVYPSVDYWGQGTLVTVSS

SEQ ID NO: 6302 - protein, 17 aa, Artificial Sequence
  Synthetic
ARGRSRGVGDVYPSVDY

SEQ ID NO: 6303 - protein, 110 aa, Artificial Sequence
  Synthetic
QSVLTQPPSASGTPGQRVTISCSGNSSNIGSNTVSWSQQLPGTAPKLLIYSNHQRPSGVPDRFSGSKSGTSASLAISGLQSEDEADYHCAAWDDSLNGPVFGGGTQLTVL

SEQ ID NO: 6304 - protein, 11 aa, Artificial Sequence
  Synthetic
AAWDDSLNGPV

SEQ ID NO: 6305 - protein, 122 aa, Artificial Sequence
  Synthetic
QLQLQESGPGLVKPSETLSLTCTVSGGSISSSSYYWAWIRQPPGKGLEWIGNIYYSGITYYSPSLKSRVTISVDTSKNQFSLKLRSVTAADTAVYYCARQHRYGSGSSELLWGQGTLVTVSS

SEQ ID NO: 6306 - protein, 14 aa, Artificial Sequence
  Synthetic
ARQHRYGSGSSELL

SEQ ID NO: 6307 - protein, 110 aa, Artificial Sequence
  Synthetic
QSVLTQPPSASGSPGQSVTISCTGTSSDVGSYNYVSWYQQHPGKAPKLMIYEVTKRPSGVPDRFSGSKSGNTASLTVSGLQADDEADYYCSSYAGSSNLIFGGGTKLTVL

SEQ ID NO: 6308 - protein, 10 aa, Artificial Sequence
  Synthetic
SSYAGSSNLI

SEQ ID NO: 6309 - protein, 120 aa, Artificial Sequence
  Synthetic
EVQLVQSGAEVKKAGEPLKISCRASGYTFTRYWIGWVRQMPGKGLEWMGIIYPHDSDTRYSPSFEGQVTISADKSISTAYLQWSRLKASDTAVYYCARRGGDYPPWFDPWGQGTLVTVSS

SEQ ID NO: 6310 - protein, 13 aa, Artificial Sequence
  Synthetic
ARRGGDYPPWFDP

SEQ ID NO: 6311 - protein, 110 aa, Artificial Sequence
  Synthetic
QSVLTQPRSVSGSPGQSVTISCTGTSSDFGAYTYVSWYQQRPGKAPKLMIYDVIKRPSGVPDRFSGSKSGNTASLTISGLQADDEADYYCCSYADSYTVIFGGGTKLTVL

SEQ ID NO: 6312 - protein, 10 aa, Artificial Sequence
  Synthetic
CSYADSYTVI

SEQ ID NO: 6313 - protein, 122 aa, Artificial Sequence
  Synthetic
QLQLQESGPGLVKPSETLSLTCTVSGGSITTSSYYWGWIRQPPGKGLEWIGAIYYTGITYYNPSLKSRVTMSVDTSKNQFALRLSSVTAADTAVYYCARQNRFGSGSSELLWGQGTLVTVSS

SEQ ID NO: 6314 - protein, 14 aa, Artificial Sequence
  Synthetic
ARQNRFGSGSSELL

SEQ ID NO: 6315 - protein, 110 aa, Artificial Sequence
  Synthetic
QSVLTQPPSASGSPGQSVTISCTGTSSDVGSYDYVSWYQQHPGKAPKLVIYEVSERPSGVPDRFSGSKSGNTATLTVSGLQADDEADYYCSSYAGSNNLIFGGGTKLTVL

SEQ ID NO: 6316 - protein, 10 aa, Artificial Sequence
  Synthetic
SSYAGSNNLI

SEQ ID NO: 6317 - protein, 132 aa, Artificial Sequence
  Synthetic
QVQLVQSGAEVKKPGASVKVSCKASGYTFTDYYLHWVRQAPGQGLEWVGWINPISGGTNYAQQFQGRVSMTRHTSITTAYMELSRLRSDDTAVYYCARVYHLLLGEGSWSPLPYYYYGMDVWGQGTTVTVSS

SEQ ID NO: 6318 - protein, 25 aa, Artificial Sequence
  Synthetic
ARVYHLLLGEGSWSPLPYYYYGMDV

SEQ ID NO: 6319 - protein, 110 aa, Artificial Sequence
  Synthetic
QSVLTQPASVSGSPGQSITISCTGTSSDVGSYNLVSWYQQHPGKAPKLMIYEGSKRPSGVSNRFSGSKSGNTASLTISGLQAEDEADYYCCSYAGSNTFVFGTGTKVTVL

SEQ ID NO: 6320 - protein, 10 aa, Artificial Sequence
  Synthetic
CSYAGSNTFV

SEQ ID NO: 6321 - protein, 129 aa, Artificial Sequence
  Synthetic
EVQLVESGGGLVKPGRSLRLSCTVSGFTFGAYAMSWFRQAPGKGLEWVGFIRSKTYGGTTEYAASLKGRFTISRDDSKSIAFLQMNSLKTEDTAVYFCSRGGYYDGSPYYWNRPDAFDIWGLGTVVTVS

SEQ ID NO: 6322 - protein, 21 aa, Artificial Sequence
  Synthetic
SRGGYYDGSPYYWNRPDAFDI

SEQ ID NO: 6323 - protein, 112 aa, Artificial Sequence
  Synthetic
QSVLTQPPSASGTPGQRITISCSGSSSNIGSNTVNWYQQLPGTAPKLLIYSNNQRPSGVPDRFSGSKSGTSASLAISGVQSEDEADYYCAAWDDSLNGPDVVFGGGTKLTVL

SEQ ID NO: 6324 - protein, 13 aa, Artificial Sequence
  Synthetic
AAWDDSLNGPDVV

SEQ ID NO: 6325 - protein, 130 aa, Artificial Sequence
  Synthetic
EVQLVESGGGLVKPGRSLRLSCTASGFTFGDYAMSWFRQAPGKGLEWVGFIRSKSYGGTTEYAASVKGRFTISRDDSKSIDYLQMNSLKTEDTAVYYCTRGGYYDGSGFYWNRPDAFDIWGQGTMVTVSS

SEQ ID NO: 6326 - protein, 21 aa, Artificial Sequence
  Synthetic
TRGGYYDGSGFYWNRPDAFDI

SEQ ID NO: 6327 - protein, 112 aa, Artificial Sequence
  Synthetic
QSVLTQPPSASGTPGQRVTISCSGSSSNIGSNTVNWYQQLPGAAPKLLIYFNNQRPSGVPDRFSGSRSGTSASLAISGLQSEDEADYYCAAWDDSLNGPDVVFGGGTKLTVL

SEQ ID NO: 6328 - protein, 13 aa, Artificial Sequence
  Synthetic
AAWDDSLNGPDVV

SEQ ID NO: 6329 - protein, 122 aa, Artificial Sequence
  Synthetic
QLQLQESGPGLVKPSETLSLTCTVSGGSISNNNYYWAWIRQPPGKGLEWIGNIYYTGITYYNPSLKSRVAISVDMSMNQFSLKLRSVTAADTAVYFCARQNRYGSGSSELLWGQGTLVTVSS

SEQ ID NO: 6330 - protein, 14 aa, Artificial Sequence
  Synthetic
ARQNRYGSGSSELL

SEQ ID NO: 6331 - protein, 110 aa, Artificial Sequence
  Synthetic
QSVLTQPPSASGSPGQSVTISCTGTSSDVGSYNYVSWYQQHPGKAPKLLIYEVTQRPSGVPDRFSGSKSGNTASLTVSGLQTEDEADYYCSSYAGSNSLVFGGGTKLTVL

SEQ ID NO: 6332 - protein, 10 aa, Artificial Sequence
  Synthetic
SSYAGSNSLV

SEQ ID NO: 6333 - protein, 126 aa, Artificial Sequence
  Synthetic
QVQLVQSGAEVKKPGSSVRVSCKASGGTFSRDALSWVRQAPGQGLEWMGGIIPISDSATYAQKFQGRVTLIADEATATAYMELSSLRSEDTAVYYCARHMVVIPVGLHYYYGMDVWGQGTTVTVSS

SEQ ID NO: 6334 - protein, 19 aa, Artificial Sequence
  Synthetic
ARHMVVIPVGLHYYYGMDV

SEQ ID NO: 6335 - protein, 111 aa, Artificial Sequence
  Synthetic
QSVLTQPPSVSGAPGQRVTISCTGSGSNIGAGFDVHWYQQLPGTAPKLLIYGNSNRPSGVPDRFSGSKSGTSASLAITGLQAEDEADYYCQSYDSGLSASVFGGGTKLTVL

SEQ ID NO: 6336 - protein, 11 aa, Artificial Sequence
  Synthetic
QSYDSGLSASV

SEQ ID NO: 6337 - protein, 124 aa, Artificial Sequence
  Synthetic
QVQLVQSGAEVKKPGSSVKVSCKASGGTFSSYSISWVRQAPGQGLEWMGGIMPILGIANYAQWFQGRVTITADESTSTAYMELSSLRSEDTAVYYCARERGYSDYGSVQYFDYWGQGTLVTVSS

SEQ ID NO: 6338 - protein, 17 aa, Artificial Sequence
  Synthetic
ARERGYSDYGSVQYFDY

SEQ ID NO: 6339 - protein, 114 aa, Artificial Sequence
  Synthetic
QSVLTQPPSVSGAPGQRVTISCTGSNSNIGAGYDVHWYQQLPGTAPKLLIYADINRPSGVPDRFSGSKSDTSASASLAITGLQAEDEADYYCQSYDSSLSGSVVFGGGTKLTVL

SEQ ID NO: 6340 - protein, 12 aa, Artificial Sequence
  Synthetic
QSYDSSLSGSVV

SEQ ID NO: 6341 - protein, 126 aa, Artificial Sequence
  Synthetic
QVQLVQSGAEVKKPGASVKVSCKASGHTFTTYYLHWVRQAPGQGLEWMGRIDPSGGSTTYAQKFQGRVTMTRDTSTSTVYMELSSLRSEDTALYYCARGGYCGSTSCSPDDYFDYWGQGTLVTVSS

SEQ ID NO: 6342 - protein, 19 aa, Artificial Sequence
  Synthetic
ARGGYCGSTSCSPDDYFDY

SEQ ID NO: 6343 - protein, 109 aa, Artificial Sequence
  Synthetic
SYVLTQPPSVSVAPGKTARITCGGNNIGSKSVHWYQQKPGQAPVLVIYYDSDRPSGIPERFSGSNSGNTATLTISRVEAGDEADYYCQVWDSSSDHYYVFGTGTKVTVL

SEQ ID NO: 6344 - protein, 12 aa, Artificial Sequence
  Synthetic
QVWDSSSDHYYV

SEQ ID NO: 6345 - protein, 124 aa, Artificial Sequence
  Synthetic
QVQLVESGGGVVQPGRSLRLSCAASGFIFSSYGMHWVRQAPGKGLEWVAGIWYDGSNKFYADSVKGRFTISRDNSKNTLYLQMNSLRAEDTAVYFCARDGAVAPAGSLDWFDPWGQGTLVTVSS

SEQ ID NO: 6346 - protein, 17 aa, Artificial Sequence
  Synthetic
ARDGAVAPAGSLDWFDP

SEQ ID NO: 6347 - protein, 108 aa, Artificial Sequence
  Synthetic
SYVLTQPPSVSVAPGKTARITCGGNYIGSKSVHWYQQKPGQAPVLVIYYDTDRPSGIPERFSGSNSGNTATLTISRVEAGDEADYYCQVWDSSGDHYVFGTGTKVTVL

SEQ ID NO: 6348 - protein, 11 aa, Artificial Sequence
  Synthetic
QVWDSSGDHYV

SEQ ID NO: 6349 - protein, 120 aa, Artificial Sequence
  Synthetic
QLQLQESGPGLVRPSETLSLTCTVSGGSISSSSYYWGWIRQPPGKGLEWIGDMYYSGSTYYTPSLRGRVTISVDTSKNQFSLKLSSVTAADTAVYYCASRGWLRGAFDVWGQGTVATVSS

SEQ ID NO: 6350 - protein, 12 aa, Artificial Sequence
  Synthetic
ASRGWLRGAFDV

SEQ ID NO: 6351 - protein, 111 aa, Artificial Sequence
  Synthetic
NFMLTQPHSVSESPGKTVTISCTHSSGSIASNYVQWYQQRPGSSPTIVIFEDNQRPSGVPDRFSGSIDSSSNSASLTISGLKTEDEADYYCQSYDSSIHVVFGGGTKLTVL

SEQ ID NO: 6352 - protein, 10 aa, Artificial Sequence
  Synthetic
QSYDSSIHVV

SEQ ID NO: 6353 - protein, 123 aa, Artificial Sequence; identical to SEQ ID NO: 417
  Synthetic

SEQ ID NO: 6354 - protein, 16 aa, Artificial Sequence
  Synthetic
AKAASRSTRIGGAFDI

SEQ ID NO: 6355 - protein, 109 aa, Artificial Sequence
  Synthetic
QSVLTQPASVSGSPGQSITISCTGTSSDVGGYNLVSWYQQHPGKAPKLMIYEGSKRPSGVSNRFSGSKSGNTASLTISGLQAEDEADYYCCSYAYSFTNVFGTGTKVTV

SEQ ID NO: 6356 - protein, 10 aa, Artificial Sequence
  Synthetic
CSYAYSFTNV

SEQ ID NO: 6357 - protein, 122 aa, Artificial Sequence
  Synthetic
EVQLVESGGDLIQPGGSLRLSCAASGFSVSNSYMSWVRQAPGKGLEWVSIIYSGGSTYYADSVKGRFTISRDNSKNTLYLQMNSLRAEDTAVYFCAKTPRGDYDSSGTSAYWGQGTLVTVSS

SEQ ID NO: 6358 - protein, 16 aa, Artificial Sequence
  Synthetic
AKTPRGDYDSSGTSAY

SEQ ID NO: 6359 - protein, 112 aa, Artificial Sequence
  Synthetic
QSVLTQSPSASASLGASVNLTCTLSSGHSSYAIAWHQQQPEKGPRFLMKLSSDGSHNKGDGIPDRFSGSSSGAERFLTISSLQSEDEADYYCQTWGIGSDWVFGGGTKLTVL

SEQ ID NO: 6360 - protein, 10 aa, Artificial Sequence
  Synthetic
QTWGIGSDWV

SEQ ID NO: 6361 - protein, 123 aa, Artificial Sequence
  Synthetic
EVQLVESGGGLVKPGGSLRLSCAASGLTFSTTWMSWVRQAPGKGLEWVGRIKSKGDGGTTDFAGPVKGRFSISRDDSKNTLYLHMNSLKTEDTAVYYCTTDDPGSYYYGMDVWGQGTTVTVSS

SEQ ID NO: 6362 - protein, 14 aa, Artificial Sequence
  Synthetic
TTDDPGSYYYGMDV

SEQ ID NO: 6363 - protein, 109 aa, Artificial Sequence
  Synthetic
QSVLTQEPSLTVSPGGTVTLTCASSTGAVTSGHYPYWFQQKPGQAPRTLIYATSNKHSWTPARFSGSLLGGKAALTLSGAQPEDEADYYCLLSYSGARVFGGGTKLTVL

SEQ ID NO: 6364 - protein, 9 aa, Artificial Sequence
  Synthetic
LLSYSGARV

SEQ ID NO: 6365 - protein, 129 aa, Artificial Sequence
  Synthetic
EVQLVESGGGLVQPGRSLRVSCAASGFTFDDYAMHWVRQAPGKGLEWVSGISWNSGSKAYADSVKGRFTISRDNAKNSLHLQMNSLRAEDKALYYCAKDVSKTGWFGEIANREYYFDYWGQGTLVTVSA

SEQ ID NO: 6366 - protein, 22 aa, Artificial Sequence
  Synthetic
AKDVSKTGWFGEIANREYYFDY

SEQ ID NO: 6367 - protein, 106 aa, Artificial Sequence
  Synthetic
SYVLTQPPSVSVSPGQTARITCSGDALPNQYVYWYQQKPGQAPLLVIYKDTERPSGIPERFSGSTSGTTVTLTISGVQAEDEADYYCQLADSSGVVFGGGTKLTVL

SEQ ID NO: 6368 - protein, 9 aa, Artificial Sequence
  Synthetic
QLADSSGVV

SEQ ID NO: 6369 - protein, 130 aa, Artificial Sequence
  Synthetic
EVQLVESGGGLVQPGRSLRLSCAASGFTFDDYAIHWVRQAPGKGLEWVSGVSWNSGTIGYADSVKGRFFISRDNAKNSLYLQMNSLRAEDTAWYYCAKIADLVGAYDFRSGQHFAAFDVWGQGTMVTVSS

SEQ ID NO: 6370 - protein, 23 aa, Artificial Sequence
  Synthetic
AKIADLVGAYDFRSGQHFAAFDV

SEQ ID NO: 6371 - protein, 108 aa, Artificial Sequence
  Synthetic
QSVLTQPPSASGTPGQRVTISCSGSSSNIGSNTVNWYQHLPGTAPKLLIYSNNQRPSGVPDRFSGSKSGTSASLAISGLQSEDEADYYCASWDDSLVVFGGGTKLTVL

SEQ ID NO: 6372 - protein, 9 aa, Artificial Sequence
  Synthetic
ASWDDSLVV

SEQ ID NO: 6373 - protein, 122 aa, Artificial Sequence
  Synthetic
QVQLQESGPGLVKPSQTLSLNCSVSGGSISSGNYYWSWIRQPAGKGLEWIGHILTRGSTNYNPSLKSRVTISVDTSGNQFSLKLSPVTAADTAVYYCARTDYDILTGYYVYWGQGTLVTVSS

SEQ ID NO: 6374 - protein, 14 aa, Artificial Sequence
  Synthetic
ARTDYDILTGYYVY

SEQ ID NO: 6375 - protein, 109 aa, Artificial Sequence
  Synthetic
SYVLTQPPSVSVAPGKTARITCGESNIGSKSVHWYQRKPGQAPVLVVYDDSDRPSGIPERFSGSNSGNTATLTISRVEVGDEADYYCQVWDGSSDHFYVFGTGTKVTVL

SEQ ID NO: 6376 - protein, 12 aa, Artificial Sequence
  Synthetic
QVWDGSSDHFYV

SEQ ID NO: 6377 - protein, 118 aa, Artificial Sequence
  Synthetic
EVQLVESGGGLIQPGGSLRLSCAASGFTVSSNYMTWVRQAPGKGLEWVSVVYSGDNTYYADSVKGRFTTSRDNSKNTVFLQMNSLKAEDTALYYCARTQWLRGSFDLWGRGTLVTVSS

SEQ ID NO: 6378 - protein, 12 aa, Artificial Sequence
  Synthetic
ARTQWLRGSFDL

SEQ ID NO: 6379 - protein, 111 aa, Artificial Sequence
  Synthetic
NFMLTQPHSVSESPGKTVTISCTHSSGSIASNYVQWYQQRPGSSPIIVIYEDNQRPSGVPDRFSGSIDSSSNSASLTISGLKTEDEADYYCQSYDVSNHWVFGGGTRLTVL

SEQ ID NO: 6380 - protein, 10 aa, Artificial Sequence
  Synthetic
QSYDVSNHWV

SEQ ID NO: 6381 - protein, 130 aa, Artificial Sequence
  Synthetic
EVQLVESGGGLVQPGRSLKLSCAASGFTFEDYAMHWVRQAPGKGLEWVSGSTWNSGTIGYADSVKGRFTISRDNAKNSLYLQMNRLRAEDTALYYCVKDLYYLGKRRSSVIFEVYGMDVWGQGTAVTVSS

SEQ ID NO: 6382 - protein, 23 aa, Artificial Sequence
  Synthetic
VKDLYYLGKRRSSVIFEVYGMDV

SEQ ID NO: 6383 - protein, 108 aa, Artificial Sequence
  Synthetic
SYVLTQPPSVSVAPGKTARLTCGGNNIGSKGVHWYQQKPGQAPVLVVYDDSDRPSGLPERFSGSNSGNTASLTISRVEAGDEADYYCQVWDSNSDLVVFGGGTKLTVL

SEQ ID NO: 6384 - protein, 11 aa, Artificial Sequence
  Synthetic
QVWDSNSDLVV

SEQ ID NO: 6385 - protein, 122 aa, Artificial Sequence
  Synthetic
QVQLQESGPGLVKPSQTLSLTCTVSGGSITSGRYYWSWIRQPAGKGLEWIGHIFTSGSTNYNPSLKSRITISVDRSKNQFSLRLSSATAADTAVYFCARGDYESLTGYYDYWGQGTLVTVSS

SEQ ID NO: 6386 - protein, 14 aa, Artificial Sequence
  Synthetic
ARGDYESLTGYYDY

SEQ ID NO: 6387 - protein, 109 aa, Artificial Sequence
  Synthetic
SYVLTQPPSVSVAPGKTARITCEENDIGSKNVHWYQQKPGQAPVLVVYDDSDRPSGIPERFSGSNSGNTATLTISRVEAGDEADYYCQVWDGSSDHFYVFGTGTKVTVL

SEQ ID NO: 6388 - protein, 12 aa, Artificial Sequence
  Synthetic
QVWDGSSDHFYV

SEQ ID NO: 6389 - protein, 122 aa, Artificial Sequence
  Synthetic
QVQLVQSGAEVKKPGASVKVSCKASGYTFSSYYMHWVRQAPGQGLEWMGIINPSAGSTSYAQKFQGRVTMTRDTSTGTVYMDLSSLRSEDTAVYYCARDIVFVPAAMGPDYWGQGTLVTVSS

SEQ ID NO: 6390 - protein, 15 aa, Artificial Sequence
  Synthetic
ARDIVFVPAAMGPDY

SEQ ID NO: 6391 - protein, 109 aa, Artificial Sequence
  Synthetic
EIVMTQSPATLSVSPGERATLSCRASQSLSSNLAWYQQKPGQAPRLLIYGASTRATGIPARFSGSGSGTEFTLTISSLQSEDFAVYYCQHYNNWPPALTFGGGTKVEIK

SEQ ID NO: 6392 - protein, 11 aa, Artificial Sequence
  Synthetic
QHYNNWPPALT

SEQ ID NO: 6393 - protein, 123 aa, Artificial Sequence; identical to SEQ ID NO: 355
  Synthetic

SEQ ID NO: 6394 - protein, 16 aa, Artificial Sequence
  Synthetic
AKGSGSQLYYYYGMDV

SEQ ID NO: 6395 - protein, 108 aa, Artificial Sequence; identical to SEQ ID NO: 356
  Synthetic

SEQ ID NO: 6396 - protein, 10 aa, Artificial Sequence
  Synthetic
QQSYSTPHSS

SEQ ID NO: 6397 - protein, 121 aa, Artificial Sequence; identical to SEQ ID NO: 319
  Synthetic

SEQ ID NO: 6398 - protein, 14 aa, Artificial Sequence
  Synthetic
ARDKRGVIRGLLNF

SEQ ID NO: 6399 - protein, 112 aa, Artificial Sequence
  Synthetic
DIVMTQSPDSLAVSLGERATINCKSSQSLLPSSNSNNYLAWYQQKSGQPPNLLIYWASTRESGVPDRFSGSGSETDFSLTISNLQAEDVAVYYCQQYYNTPHTFGGGTRVEI

SEQ ID NO: 6400 - protein, 9 aa, Artificial Sequence
  Synthetic
QQYYNTPHT

SEQ ID NO: 6401 - protein, 119 aa, Artificial Sequence; identical to SEQ ID NO: 313
  Synthetic

SEQ ID NO: 6402 - protein, 12 aa, Artificial Sequence
  Synthetic
ARDGGAYDRFDY

SEQ ID NO: 6403 - protein, 107 aa, Artificial Sequence
  Synthetic
DIQMTQSPSSLSASVGDRVTITCQASQDIKKFLNWYQQKPGKAPKLLIYDASNLETGVPSRFSGSGSGTDLTFTISSLQPEDIATYYCQQYDNLPLTFGQGTKVEIK

SEQ ID NO: 6404 - protein, 9 aa, Artificial Sequence
  Synthetic
QQYDNLPLT

SEQ ID NO: 6405 - protein, 120 aa, Artificial Sequence; identical to SEQ ID NO: 317
  Synthetic

SEQ ID NO: 6406 - protein, 13 aa, Artificial Sequence
  Synthetic
AKSWWLSENWFDP

SEQ ID NO: 6407 - protein, 107 aa, Artificial Sequence; identical to SEQ ID NO: 318
  Synthetic

SEQ ID NO: 6408 - protein, 9 aa, Artificial Sequence
  Synthetic
QQYNNWPLT

SEQ ID NO: 6409 - protein, 127 aa, Artificial Sequence
  Synthetic
QVQLVESGGGVVQPGRSLRLSCAASGFTFSKYGMHWVRQAPGKGLEWVAVISYDGSNIYYVDSVKGRFTISRDNSKHTLYLQMDSLRAEDTAVYYCAKNAGLYCSGGSCYSGIFDYWGQGSLVTVSS

SEQ ID NO: 6410 - protein, 20 aa, Artificial Sequence
  Synthetic
AKNAGLYCSGGSCYSGIFDY

SEQ ID NO: 6411 - protein, 106 aa, Artificial Sequence
  Synthetic
DIQMTQSPSSLSASVGDRVTITCQASQDISNYLNWYQQKPGKAPKLLIYDASNLEAGVPSRFSGSGSGTDFTFTITSLQPEDIATYYCQQYNNLPPITFGQGTRLE

SEQ ID NO: 6412 - protein, 10 aa, Artificial Sequence
  Synthetic
QQYNNLPPIT

SEQ ID NO: 6413 - protein, 121 aa, Artificial Sequence
  Synthetic
QVQLVESGGGVVQSGRSLRLSCTASGFIFSSYALHWVRQAPGKGPEWVAVVSDDGRGKFYADSVKGRFTISRDNSKNTLYLQMNSLRAEDTAVYYCATERPFGLVPVFDYWGQGTLVTVSS

SEQ ID NO: 6414 - protein, 14 aa, Artificial Sequence
  Synthetic
ATERPFGLVPVFDY

SEQ ID NO: 6415 - protein, 108 aa, Artificial Sequence
  Synthetic
DIQMTQSPSSLSASVGDRVTITCRASQSISGYLNWYQQKPGKAPKLLIFATSSLQTGVPSRFSGSGSGTDFTLTISSLQPEDFATYYCQQSYSTLALTFGGGTKVEIK

SEQ ID NO: 6416 - protein, 10 aa, Artificial Sequence
  Synthetic
QQSYSTLALT

SEQ ID NO: 6417 - protein, 118 aa, Artificial Sequence
  Synthetic
QVQLVQSGAEVKKPGASVKVSCKASGYTFTSYGIIWVRQAPGQRPEWMGWITTYSGDTNYAQKFQGRVTMTTDTSTSTAYMELRSLRSDDTAVYYCARVDGNYVQDSWGQGTLVTVAS

SEQ ID NO: 6418 - protein, 11 aa, Artificial Sequence
  Synthetic
ARVDGNYVQDS

SEQ ID NO: 6419 - protein, 109 aa, Artificial Sequence
  Synthetic
EIVMTQSPATLSVFRGERATLSCRASQSVSRNLAWFQHKPGQAPRLLIYAASTRAAGIPARFSGSGSGTEFTLTISSLQSEDFAIYYCQYYDNWPPIFTFGPGTKVDVK

SEQ ID NO: 6420 - protein, 11 aa, Artificial Sequence
  Synthetic
QYYDNWPPIFT

SEQ ID NO: 6421 - protein, 122 aa, Artificial Sequence; identical to SEQ ID NO: 309
  Synthetic

SEQ ID NO: 6422 - protein, 14 aa, Artificial Sequence
  Synthetic
ARHFADGSGRVVDY

SEQ ID NO: 6423 - protein, 108 aa, Artificial Sequence; identical to SEQ ID NO: 310
  Synthetic

SEQ ID NO: 6424 - protein, 10 aa, Artificial Sequence
  Synthetic
QQRSNWPLYT

SEQ ID NO: 6425 - protein, 125 aa, Artificial Sequence
  Synthetic
QVQLVQSGTEVKKPGSSVKVSCKASRGTFSSSAISWVRQAPGQGLEWMGGIIPIFGTADYTQRFQGRVTITADKSTSTVYMELSSLRSGDTAVYYCARGGPYGSGTYYPYYFDYWGLGTLVIVSS

SEQ ID NO: 6426 - protein, 18 aa, Artificial Sequence
  Synthetic
ARGGPYGSGTYYPYYFDY

SEQ ID NO: 6427 - protein, 113 aa, Artificial Sequence
  Synthetic
  misc_feature (27)..(27): Xaa can be any naturally occurring amino acid
DIVMTQSPDSLAVSLGERALINCKSSXSVLYSSNNKNYFAWYQQKPGQPPKLLIYWASTRESGVPDRFSGSGSGTDFTLTISSLQAEDVAVYYCQQYYSTPWTFGQGTKVEIK

SEQ ID NO: 6428 - protein, 9 aa, Artificial Sequence
  Synthetic
QQYYSTPWT

SEQ ID NO: 6429 - protein, 123 aa, Artificial Sequence
  Synthetic
EVQLVESGGVVVQPGGSLRITCAASGFSFDDYSMHWVRQAPGKGLEWVSVIFWDGSTAHYADSVRGRFTISRDNSKKSLYLQMNSLRTEDTAFYYCAKDSEDCSSTSCYVDSWGQGTLVTVSS

SEQ ID NO: 6430 - protein, 16 aa, Artificial Sequence
  Synthetic
AKDSEDCSSTSCYVDS

SEQ ID NO: 6431 - protein, 113 aa, Artificial Sequence
  Synthetic
  misc_feature (15)..(15): Xaa can be any naturally occurring amino acid
DIVMTQSPDSLAVSXGERATINCKSSQSVFYSSNNKNYLAWYQQKPGQPPKLLIYWASTRESGVPGRFSGSGSGTDFTLTITSLQAEDVAVYYCQQYYNTPYTFGQGTKLEIK

SEQ ID NO: 6432 - protein, 9 aa, Artificial Sequence
  Synthetic
QQYYNTPYT

SEQ ID NO: 6433 - protein, 123 aa, Artificial Sequence; identical to SEQ ID NO: 275
  Synthetic

SEQ ID NO: 6434 - protein, 17 aa, Artificial Sequence
  Synthetic
ARKPLLHSNISPGAFDI

SEQ ID NO: 6435 - protein, 107 aa, Artificial Sequence
  Synthetic
EIVLTQSPGTLSLSPGERATLSCRASQSVAGSYLAWYQQKPGQAPRLLIYGASSRATGVPDRISGSGSGTDFTLTISRLEPEDFAVYYCQQYTNTPRTFGGGTKVEF

SEQ ID NO: 6436 - protein, 9 aa, Artificial Sequence
  Synthetic
QQYTNTPRT

SEQ ID NO: 6437 - protein, 122 aa, Artificial Sequence
  Synthetic
QVQLVQSGAEVKKPGASVKVSCRASGYSFTDYYIHWLRQAPGQGLEWMGIINPDAGSTTYAQRFQGRVTMTSDTSTTTVYMQLSSLRSEDTAVYYCARDLVLIPADDAFDIWGQGTMVTVFS

SEQ ID NO: 6438 - protein, 15 aa, Artificial Sequence
  Synthetic
ARDLVLIPADDAFDI

SEQ ID NO: 6439 - protein, 107 aa, Artificial Sequence
  Synthetic
DIQMTQSPSSLSASVGDRVIITCRAGQSISNFLNWYQQKPGAAPKLLIYAASSFQSGVPSRFSGSGSGTDFTLTISSLQPEDFATYFCQQSYSTPWTFGQGTKVEIK

SEQ ID NO: 6440 - protein, 9 aa, Artificial Sequence
  Synthetic
QQSYSTPWT

SEQ ID NO: 6441 - protein, 121 aa, Artificial Sequence; identical to SEQ ID NO: 319
  Synthetic

SEQ ID NO: 6442 - protein, 14 aa, Artificial Sequence
  Synthetic
ARDKRGVIRGLLNF

SEQ ID NO: 6443 - protein, 112 aa, Artificial Sequence
  Synthetic
  misc_feature (15)..(15): Xaa can be any naturally occurring amino acid
DIVMTQSPDSLAVSXGERATINCKSSQSLLPSSNSNNYLAWYQQKSGQPPNLLIYWASTRESGVPDRFSGSGSETDFSLTISNLQAEDVAVYYCQQYYNTPHTFGGGTRVEI

SEQ ID NO: 6444 - protein, 9 aa, Artificial Sequence
  Synthetic
QQYYNTPHT

SEQ ID NO: 6445 - protein, 130 aa, Artificial Sequence
  Synthetic
EVQLVESGGGLVKPGGSLRLSCAASGITFSKAWMTWVRQAPGKGLEWVGRIKSKADGGTSDYAAPLKGRFTISRDDSKNTLYLQVNSLKIEDTGVYYCATDDPGDPGADSSYYYYYMDVWGKGTTVTVSS

SEQ ID NO: 6446 - protein, 21 aa, Artificial Sequence
  Synthetic
ATDDPGDPGADSSYYYYYMDV

SEQ ID NO: 6447 - protein, 107 aa, Artificial Sequence
  Synthetic
EIVLTQSPATLSLSPGDRATLSCRASQRIVSYLAWYQQKPGQAPRLLIYDASNRAPGIPVRFSGSGSETDFTLTISTLEPEDFAVYYCQQRNYLPFTFGPGTQLDIK

SEQ ID NO: 6448 - protein, 9 aa, Artificial Sequence
  Synthetic
QQRNYLPFT

SEQ ID NO: 6449 - protein, 120 aa, Artificial Sequence
  Synthetic
QVQLVESGGGVVQPGRSLRLSCAASGFTFPIYPMHWVRQAPGKGLEWVAAISYDGINKHYADSVKGRFTISRDNSKNTLYLQMYSLRAEDTAVYYCASLITLIRAVPDLWGQGALVTVSS

SEQ ID NO: 6450 - protein, 13 aa, Artificial Sequence
  Synthetic
ASLITLIRAVPDL

SEQ ID NO: 6451 - protein, 107 aa, Artificial Sequence
  Synthetic
DIQMTQSPSSLSASVGDRVTITCRASQNISNYLNWYQQKPGKAPSLLIYAASTLQSGVPSRFIGSGSGTDFTLTISSLQPEDFATYYCQQSYSTPRTFGPGTKVDIE

SEQ ID NO: 6452 - protein, 9 aa, Artificial Sequence
  Synthetic
QQSYSTPRT

SEQ ID NO: 6453 - protein, 125 aa, Artificial Sequence; identical to SEQ ID NO: 337
  Synthetic

SEQ ID NO: 6454 - protein, 18 aa, Artificial Sequence
  Synthetic
ARDFSNSDMVTLSDAFDI

SEQ ID NO: 6455 - protein, 111 aa, Artificial Sequence; identical to SEQ ID NO: 338
  Synthetic

SEQ ID NO: 6456 - protein, 10 aa, Artificial Sequence
  Synthetic
QQLNSYPLFT

SEQ ID NO: 6457 - protein, 121 aa, Artificial Sequence
  Synthetic
QVQLVQSGAEVKKPGSSVKVSCKASGGIFSSYAISWVRQAPGHGLEWMGGVIPIFGATIYAQKFQGRVTITADESTGTAYMELSSLRFEDTAVYYCARVSRGVNALDLDYWGQGTLVTVSS

SEQ ID NO: 6458 - protein, 14 aa, Artificial Sequence
  Synthetic
ARVSRGVNALDLDY

SEQ ID NO: 6459 - protein, 108 aa, Artificial Sequence
  Synthetic
EIVLTQSPATLSLSPGERATLSCRASQSVSSYLAWYQQKPGQAPRLLIYDASNRATGIPARFSGSGSGTDFTLTISSLEPEDFAVYYCQQRSNWPPWTFGQGTKVEIK

SEQ ID NO: 6460 - protein, 10 aa, Artificial Sequence
  Synthetic
QQRSNWPPWT

SEQ ID NO: 6461 - protein, 124 aa, Artificial Sequence
  Synthetic
QVQLVQSGAEVKKPGASVKVSCKVSGYTLTELSMHWVRQAPGKGLEWMGGFDPEDGETIYEQKFQGRVTMTEDTSTGTAYMELSSLRSEDTAVYYCATVSFDWLVDELDAFDVWGQGTMVTVSS

SEQ ID NO: 6462 - protein, 17 aa, Artificial Sequence
  Synthetic
ATVSFDWLVDELDAFDV

SEQ ID NO: 6463 - protein, 110 aa, Artificial Sequence
  Synthetic
EIVLTQSPGTLSLSPGERATLSCRASQSVSSSYLAWYQQKPGQAPRLLIYGAFSRATGIPDRFSGSGSGTDFTLTISRLEPEDFAVYYCQQYGGSPPRVIFGPGTKVEIK

SEQ ID NO: 6464 - protein, 11 aa, Artificial Sequence
  Synthetic
QQYGGSPPRVI

SEQ ID NO: 6465 - protein, 127 aa, Artificial Sequence
  Synthetic
QVQLVESGGGVVQPGRSLRLSCAASGFTFSSYGMHWVRQAPGKGLEWVAVILYDGSNKYYEDSVKGRFTISRDNSKNTLYLQMNSLRAEDTAVYYCAKVTSPYCSGTNCYTGYFDYWGQGTLVTVSS

SEQ ID NO: 6466 - protein, 20 aa, Artificial Sequence
  Synthetic
AKVTSPYCSGTNCYTGYFDY

SEQ ID NO: 6467 - protein, 106 aa, Artificial Sequence
  Synthetic
  misc_feature (10)..(10): Xaa can be any naturally occurring amino acid
DIQMTQSPVXLSASVGDRVTITCRASQSITSWLAWYQQKPGKAPQLLIYKASSLESGVPSRFSGSGSGTEFTLTISSLQPDDFATYYCQQYNSYSTFGQGTKVEIK

SEQ ID NO: 6468 - protein, 8 aa, Artificial Sequence
  Synthetic
QQYNSYST

SEQ ID NO: 6469 - protein, 117 aa, Artificial Sequence
  Synthetic
EVQLVESGGGLIQPGGSLRLSCAASEIIVSSNYMSWVRQAPGKGLEWVSVIYSGGSTFYADSVKGRFTISRDNSKNTLYLQMNSLRAEDTAVYYCARAFGGDYFDYWGQGTLVTVSS

SEQ ID NO: 6470 - protein, 11 aa, Artificial Sequence
  Synthetic
ARAFGGDYFDY

SEQ ID NO: 6471 - protein, 109 aa, Artificial Sequence
  Synthetic
EIVLTQSPGTLSLSPGERATLSCRASQSISSSFLAWYQQKPGQAPRLLIYGVSSRATGIPDRFSGSGSETDFTLTISRLEPEDFAVYYCQQYGSSPSLTFGGGTKVEIK

SEQ ID NO: 6472 - protein, 10 aa, Artificial Sequence
  Synthetic
QQYGSSPSLT

SEQ ID NO: 6473 - protein, 120 aa, Artificial Sequence
  Synthetic
QVQLVESGGGVVQPGRSLRLSCAASGFTFSSYGMHWVRQAPGKGLEWVAVISYDGSNKYYADSVKGRFTISRDDSKNTLYLQMNSLRAEDTAVYYCAKMHYYYGSASPHWGQGTLVTVSS

SEQ ID NO: 6474 - protein, 13 aa, Artificial Sequence
  Synthetic
AKMHYYYGSASPH

SEQ ID NO: 6475 - protein, 107 aa, Artificial Sequence
  Synthetic
DIQMTQSPSSLSASVGDRVTITCQASQDISNYLNWYQQKPGKAPKLLIYDASNLETGVPSRFSGSGSGTDFTFTISSLQPEDIATYYCQQYENLLISFGPGTKVDIK

SEQ ID NO: 6476 - protein, 9 aa, Artificial Sequence
  Synthetic
QQYENLLIS

SEQ ID NO: 6477 - protein, 120 aa, Artificial Sequence; identical to SEQ ID NO: 279
  Synthetic

SEQ ID NO: 6478 - protein, 11 aa, Artificial Sequence
  Synthetic
TRWDGWSQHDY

SEQ ID NO: 6479 - protein, 111 aa, Artificial Sequence; identical to SEQ ID NO: 280
  Synthetic

SEQ ID NO: 6480 - protein, 9 aa, Artificial Sequence
  Synthetic
MQVLQIPYT

SEQ ID NO: 6481 - protein, 122 aa, Artificial Sequence; identical to SEQ ID NO: 301
  Synthetic

SEQ ID NO: 6482 - protein, 16 aa, Artificial Sequence
  Synthetic
ARVRFDTSGYFWSLDY

SEQ ID NO: 6483 - protein, 108 aa, Artificial Sequence
  Synthetic
DIQMTQSPSSLSASVGDRVTITCRASQSISSYLNWYQQKPGKAPKLLIYAASSLQSGVPSRFSGSGSGTDFTLTISSLQPEDFATYYCQQSYSNPQYTFGQGTKLDIK

SEQ ID NO: 6484 - protein, 10 aa, Artificial Sequence
  Synthetic
QQSYSNPQYT

SEQ ID NO: 6485 - protein, 122 aa, Artificial Sequence
  Synthetic
QVQLVQSGAEVKKPGASVKVSCQASGYTFTDYYIHWVRQAPGQGLEWMGIINPSAGSTTYAQKFQDTVTMTRDTSTSTVYMELSSLRSEDTALYYCARGGLIPATGDAFDIWGQGTMVTVSS

SEQ ID NO: 6486 - protein, 15 aa, Artificial Sequence
  Synthetic
ARGGLIPATGDAFDI

SEQ ID NO: 6487 - protein, 110 aa, Artificial Sequence
  Synthetic
EIVMTQSPATLSVSPGERATLSCRASQTLSSNLAWYQQNPGQAPRLLIYGASTRATGIPARFSGSGSGTEFTLTISSLQSEDFAVYYCQQYKSWPELMYTFGQGTKLEIK

SEQ ID NO: 6488 - protein, 12 aa, Artificial Sequence
  Synthetic
QQYKSWPELMYT

SEQ ID NO: 6489 - protein, 123 aa, Artificial Sequence
  Synthetic
EVQLVESGGVVVQPGGSLRLSCAASGFTFDDYSMHWVRQVPGKGLEWIAVIFWDGTSTYYADSVKGRFTISRDNSKKSLYLQMNSLRSEDTALYYCAKDSEDCSSTSCYVDHWGQGTLVIVSS

SEQ ID NO: 6490 - protein, 16 aa, Artificial Sequence
  Synthetic
AKDSEDCSSTSCYVDH

SEQ ID NO: 6491 - protein, 113 aa, Artificial Sequence; identical to SEQ ID NO: 294
  Synthetic

SEQ ID NO: 6492 - protein, 9 aa, Artificial Sequence
  Synthetic
QQYYNTPYT

SEQ ID NO: 6493 - protein, 121 aa, Artificial Sequence
  Synthetic
QVQLVESGGGVVQPGRSLRLSCAASGFTFSSFDMHWVRQAPGKGLEWVAVISYDGSIKYSADSVKGRFTISRDNSKNTLYLQMNSLRAEDTAVYYCAKDSLGLLVPVFDYWGQGTLVTVSS

SEQ ID NO: 6494 - protein, 14 aa, Artificial Sequence
  Synthetic
AKDSLGLLVPVFDY

SEQ ID NO: 6495 - protein, 108 aa, Artificial Sequence
  Synthetic
DIQMTQSPSSLSASVGDRVTITCRASQSISSYLNWYQQKPGKAPKLLIYAASSLQSGVPSRFSGNGSGTDFTLTISSLQPEDFATYYCQQSYTTLALTFGGGTKVEIK

SEQ ID NO: 6496 - protein, 10 aa, Artificial Sequence
  Synthetic
QQSYTTLALT

SEQ ID NO: 6497 - protein, 129 aa, Artificial Sequence
  Synthetic
QVQLVESGGGVVQPGRPLRLSCAASGFSFFAYGMHWVRQAPGKGLEWVALISYDGGKEYYADSMKGRFTISRDNSKNTLYLQMNSLRPEDTAVYYCAKDHSTVSGAFGELLGSGPVDPWGQGTLVTVSS

SEQ ID NO: 6498 - protein, 22 aa, Artificial Sequence
  Synthetic
AKDHSTVSGAFGELLGSGPVDP

SEQ ID NO: 6499 - protein, 109 aa, Artificial Sequence
  Synthetic
EIVMTQSPATLSVSPGERATLSCRASQSITSNLAWYQQKPGQAPRLLIYGASTRATGIPARFSGSGSGTEFTLTISSLQSEDFAVYYCQEYDRWPRGYTFGQGTKLQIK

SEQ ID NO: 6500 - protein, 11 aa, Artificial Sequence
  Synthetic
QEYDRWPRGYT

SEQ ID NO: 6501 - protein, 122 aa, Artificial Sequence; identical to SEQ ID NO: 359
  Synthetic

SEQ ID NO: 6502 - protein, 15 aa, Artificial Sequence
  Synthetic
ARDLVFVPATSAMDV

SEQ ID NO: 6503 - protein, 107 aa, Artificial Sequence; identical to SEQ ID NO: 360
  Synthetic

SEQ ID NO: 6504 - protein, 9 aa, Artificial Sequence
  Synthetic
QQRSNWLFT

SEQ ID NO: 6505 - protein, 122 aa, Artificial Sequence; identical to SEQ ID NO: 363
  Synthetic

SEQ ID NO: 6506 - protein, 16 aa, Artificial Sequence
  Synthetic
ARANYDSSGYHNWFDP

SEQ ID NO: 6507 - protein, 107 aa, Artificial Sequence; identical to SEQ ID NO: 364
  Synthetic

SEQ ID NO: 6508 - protein, 10 aa, Artificial Sequence
  Synthetic
QQSYSMPSWT

SEQ ID NO: 6509 - protein, 117 aa, Artificial Sequence; identical to SEQ ID NO: 341
  Synthetic

SEQ ID NO: 6510 - protein, 11 aa, Artificial Sequence
  Synthetic
ARDLGTGLFDY

SEQ ID NO: 6511 - protein, 108 aa, Artificial Sequence; identical to SEQ ID NO: 342
  Synthetic

SEQ ID NO: 6512 - protein, 10 aa, Artificial Sequence
  Synthetic
QLLNSNPPGT

SEQ ID NO: 6513 - protein, 119 aa, Artificial Sequence
  Synthetic
QVQLQESGPGLVKPSETLSLTCTVSGGSIGYYYWSWIRQPPGKGLEWIGYIYYSGNTDYNPSLRSRVTISVDTSKNHFSLNLRSVTAADTAVYFCARSDGYQWAYFDLWGQGTRVTVSS

SEQ ID NO: 6514 - protein, 13 aa, Artificial Sequence
  Synthetic
ARSDGYQWAYFDL

SEQ ID NO: 6515 - protein, 107 aa, Artificial Sequence
  Synthetic
DIQMTQSPSTLSASVGARVTITCRASQSISSWLAWYQQKPGIAPKLLIYKASTLQSGVPSRFSGSGSGTEFTLTISSLQPDDFATYYCQQYASYSLTFGGGTKVEIK

SEQ ID NO: 6516 - protein, 9 aa, Artificial Sequence
  Synthetic
QQYASYSLT

SEQ ID NO: 6517 - protein, 120 aa, Artificial Sequence
  Synthetic
QVQLVESGGGVVQPGTSLRLSCAASGFTFNNYGIHWVRQAPGKGLEWVAAVWPDGINKYYEDSVKGRFTISRDNSKNTLYLQMNSLRAEDTALYYCARGDSGAWPHFDFWGQGTLVTVSS

SEQ ID NO: 6518 - protein, 13 aa, Artificial Sequence
  Synthetic
ARGDSGAWPHFDF

SEQ ID NO: 6519 - protein, 108 aa, Artificial Sequence
  Synthetic
EIVMTQSPATLSVSPGERATLSCRASQTISNNLAWYQQKPGQPPRLLIYGASTRATGIPARFSGSGSGTDFSLTISSLQSEDFAVYFCQQYDTWPPLTFGGGTKVEIK

SEQ ID NO: 6520 - protein, 10 aa, Artificial Sequence
  Synthetic
QQYDTWPPLT

SEQ ID NO: 6521 - protein, 122 aa, Artificial Sequence; identical to SEQ ID NO: 291
  Synthetic

SEQ ID NO: 6522 - protein, 15 aa, Artificial Sequence
  Synthetic
ARDLENVMIEVALES

SEQ ID NO: 6523 - protein, 108 aa, Artificial Sequence; identical to SEQ ID NO: 292
  Synthetic

SEQ ID NO: 6524 - protein, 10 aa, Artificial Sequence
  Synthetic
QQSYTTLALT

SEQ ID NO: 6525 - protein, 128 aa, Artificial Sequence
  Synthetic
QVQLVQSGAEVKKPGSSVKVSCKASGGTFSTYVISWVRQAPGQGLEWMGGIIPIFGAAHYAQKSQGRVTITADESTSTAYMELRSLRSEDTAVYYCARGQLERRPRCTAGCYYYAMDVWGQGTTVTVS

SEQ ID NO: 6526 - protein, 22 aa, Artificial Sequence
  Synthetic
ARGQLERRPRCTAGCYYYAMDV

SEQ ID NO: 6527 - protein, 113 aa, Artificial Sequence
  Synthetic
DIVMTQSPLSLPVTPGEPASISCMSSQSLLHSNGYNYLDWYLQKPGQSPQLLIYLGSNRASGVPDRFSGSGSGTDFTLKITRVEAEDVGVYYCMQALQTPMYTFGQGTKLEIK

SEQ ID NO: 6528 - protein, 10 aa, Artificial Sequence
  Synthetic
MQALQTPMYT

SEQ ID NO: 6529 - protein, 117 aa, Artificial Sequence
  Synthetic
EVQLVESGGGLIQPGGSLRLSCAASGFIVSRNYMSWVRQAPGKGLEWVSIIYSGGSTFYADSVKGRFTISRDNSKNTVYLQMNSLRAEDTAVYYCARDYGDFYFDYWGQGTLVTVAS

SEQ ID NO: 6530 - protein, 11 aa, Artificial Sequence
  Synthetic
ARDYGDFYFDY

SEQ ID NO: 6531 - protein, 108 aa, Artificial Sequence; identical to SEQ ID NO: 274
  Synthetic

SEQ ID NO: 6532 - protein, 9 aa, Artificial Sequence
  Synthetic
QQYGSSPRT

SEQ ID NO: 6533 - protein, 122 aa, Artificial Sequence; identical to SEQ ID NO: 281
  Synthetic

SEQ ID NO: 6534 - protein, 16 aa, Artificial Sequence
  Synthetic
ASYYNDTSGYSYGLDV

SEQ ID NO: 6535 - protein, 107 aa, Artificial Sequence
  Synthetic
DIQMTQSPSSLSAFVGDRVTITCRAGQSISSYLHWYQQKPGKAPKLLIYATSTLQSGVPSRFSGRGSGTDFTLTISGLQPEDFATYYCQQSYSTPQTFGQGTKVEVK

SEQ ID NO: 6536 - protein, 9 aa, Artificial Sequence
  Synthetic
QQSYSTPQT

SEQ ID NO: 6537 - protein, 126 aa, Artificial Sequence
  Synthetic
QVQLVESGGGVVQAGGSLTLSCAVSGFTFSSYGMHWVRQAPGKGLEWVAVISYDGDDKYYADSVKGRFTISRDNSKNTLYLEIHSLTPEDTAVYYCAKKGAPYCGVDCRRGYLDYWGQGALVTDSS

SEQ ID NO: 6538 - protein, 19 aa, Artificial Sequence
  Synthetic
AKKGAPYCGVDCRRGYLDY

SEQ ID NO: 6539 - protein, 107 aa, Artificial Sequence
  Synthetic
DIQMTQSPSSLSASVGDRVTITCQASQDISNYLNWYQQRPGKAPKLLIYDASNLETGVPSRFSGSGSGTDFSFTISSLQPEDIATYYCQQYDNLPLTFGGGTKVAIK

SEQ ID NO: 6540 - protein, 9 aa, Artificial Sequence
  Synthetic
QQYDNLPLT

SEQ ID NO: 6541 - protein, 124 aa, Artificial Sequence
  Synthetic
QVQLVESGGGVVQPGRSLRLSCAASGLTFRRYAMHWVRQAPGKGLEWVALISFDGSDKYYVESVKGRFTISRDNSKNTLYLQMNSLRPEDTAVYYCAKGSYYDILTGYYGLDYWGQGTLVTVSS

SEQ ID NO: 6542 - protein, 17 aa, Artificial Sequence
  Synthetic
AKGSYYDILTGYYGLDY

SEQ ID NO: 6543 - protein, 112 aa, Artificial Sequence
  Synthetic
DIVMTQSPLSLPVTPGEPASISCRSSQSLLQSNGYNYLDWYLQKPGQSPQLLIYLGSNRASGVPDRFSGSGSGTDFTLKISRVEAEDVGVYYCMQPLQTPYTFGQGTKLEIK

SEQ ID NO: 6544 - protein, 9 aa, Artificial Sequence
  Synthetic
MQPLQTPYT

SEQ ID NO: 6545 - protein, 129 aa, Artificial Sequence; identical to SEQ ID NO: 345
  Synthetic

SEQ ID NO: 6546 - protein, 22 aa, Artificial Sequence
  Synthetic
ASGLLWFETAGGSGAPDYGMAV

SEQ ID NO: 6547 - protein, 107 aa, Artificial Sequence; identical to SEQ ID NO: 346
  Synthetic

SEQ ID NO: 6548 - protein, 9 aa, Artificial Sequence
  Synthetic
QQSYNTPLT

SEQ ID NO: 6549 - protein, 124 aa, Artificial Sequence
  Synthetic
EVQLVESGGGFVQPGGSLRLSCTASGFTFSSDDMHWVRQTTGKGLEWVSGIGTSGDTYYVESVKGRFTLSRENAKNSLYLQMNSLTVGDTAVYYCVRGTVTSLGAVWYYYMDVWGKGTTVTVSS

SEQ ID NO: 6550 - protein, 18 aa, Artificial Sequence
  Synthetic
VRGTVTSLGAVWYYYMDV

SEQ ID NO: 6551 - protein, 108 aa, Artificial Sequence
  Synthetic
DIQMTQSPSSLSASVGDRVSITCRASQSISSYLNWYQQKPGKAPKLLIYAASSLQSGVPSRFSGSGSGTDFTLTISSLQPEDFATYYCQQSYIMPPYTFGQGTKLEIK

SEQ ID NO: 6552 - protein, 10 aa, Artificial Sequence
  Synthetic
QQSYIMPPYT

SEQ ID NO: 6553 - protein, 127 aa, Artificial Sequence
  Synthetic
QVQLVESGGGVVQPGRSLRLSCVASGFTFSRYGMHWVRQAPGKGLEWVAVISYDGSNKYYADSVKGRFTISRDNSKNTLYLQMNSLRAEDTAVYYCAKNRGTYCSGGSCHSYPDEYWGQGTLVTVSS

SEQ ID NO: 6554 - protein, 20 aa, Artificial Sequence
  Synthetic
AKNRGTYCSGGSCHSYPDEY

SEQ ID NO: 6555 - protein, 106 aa, Artificial Sequence
  Synthetic
DIQMTQSPSSLSASVGDRVTITCQASQDITSYLNWYQQKPGKAPKLLISDASNLETGVPSRFSGSGSGTDFTFTISSLQPEDVATYYCQQYDNVPLFGPGTKVDIK

SEQ ID NO: 6556 - protein, 8 aa, Artificial Sequence
  Synthetic
QQYDNVPL

SEQ ID NO: 6557 - protein, 122 aa, Artificial Sequence
  Synthetic
EVQLVQSGAEVKKPGESLKISCKGSGYSFTSYWIGWVRQMPGKGLEWMGIIYPGDSETTYSPSFQGQVTISADKSISTAYLQWSSLKASDTAIYYCARRRGELSYYYGLDVWGQGTTVTVSS

SEQ ID NO: 6558 - protein, 15 aa, Artificial Sequence
  Synthetic
ARRRGELSYYYGLDV

SEQ ID NO: 6559 - protein, 108 aa, Artificial Sequence
  Synthetic
DIQMTQSPVSLSASVGDRVTITCRASQSIGDYLNWYQHKPGKAPKLLIYAASSLQSGVPSRFSGSGSGTEFTLTISSLQPEDFATYYCQQTYSTLRGTFGQGTKVEIK

SEQ ID NO: 6560 - protein, 10 aa, Artificial Sequence
  Synthetic
QQTYSTLRGT

SEQ ID NO: 6561 - protein, 125 aa, Artificial Sequence
  Synthetic
QVQLVESGGGVVQSGRSLRLSCAVSGFTFRNYGMHWVRQAPGKGLEWVAIIWYDGSNKYYTDSVKGRFTISRDNSKNTLYLQMNSLRAEDTAVYYCARDFSLTDMVTLTDAFDVWGQGTMVTVSS

SEQ ID NO: 6562 - protein, 18 aa, Artificial Sequence
  Synthetic
ARDFSLTDMVTLTDAFDV

SEQ ID NO: 6563 - protein, 108 aa, Artificial Sequence
  Synthetic
DIQLTQSPSFLSASVGDRVTITCRASQGISNYFAWYQQKPGKAPKLLIYAASTLQSGVPSRFSGSGSGTEFTLTISSLQPEDFATYYCQQLNTYPLFTFGPGTKVDIK

SEQ ID NO: 6564 - protein, 10 aa, Artificial Sequence
  Synthetic
QQLNTYPLFT

SEQ ID NO: 6565 - protein, 117 aa, Artificial Sequence
  Synthetic
EVQLVESGGGLIQPGGSLRLSCAASGFIVSANYMSWVRQAPGKGLEWVSLIYSGGSTYYADSVKGRFTISRDNSKNTLYLQMNSLRAEDTAVYYCARGRPECLFDYWGQGTLVTVSS

SEQ ID NO: 6566 - protein, 11 aa, Artificial Sequence
  Synthetic
ARGRPECLFDY

SEQ ID NO: 6567 - protein, 107 aa, Artificial Sequence
  Synthetic
DIQMTQSPSSLSASVGDRVTITCQASQDINNFLNWYQQKPGKAPKLLIYDASNLETGVPSRFSGSGSGTDFTFTISSLQPEDIATYYCQHYDNLPSTFGQGTKLEIK

SEQ ID NO: 6568 - protein, 9 aa, Artificial Sequence
  Synthetic
QHYDNLPST

SEQ ID NO: 6569 - protein, 117 aa, Artificial Sequence
  Synthetic
EVQLVESGGGLIQPGGSLRLSCTASGIIVSNNYMSWVRQAPGKGLDWVSLIYSGGSTFYADSVKGRFTVSRDNSKNTLYLQMNSLRADDTALYYCARDRGRPAFDIWGQGTMVTVSS

SEQ ID NO: 6570 - protein, 11 aa, Artificial Sequence
  Synthetic
ARDRGRPAFDI

SEQ ID NO: 6571 - protein, 107 aa, Artificial Sequence
  Synthetic
DIQMTQSPSSLSASVGDRVTITCQASQDTSIYLNWFQQKPGKAPKLLIYDASYLETGVSSRFSGSGSGTDFTFTISSLQPEDIATYYCQQYDNLPRTFGGGTKVEIK

SEQ ID NO: 6572 - protein, 9 aa, Artificial Sequence
  Synthetic
QQYDNLPRT

SEQ ID NO: 6573 - protein, 127 aa, Artificial Sequence
  Synthetic
QVQLVESGGGVVQPGKSLRLSCAASGFTFKTYGMHWVRQAPGKGLEWVAAISYDGDDKYYGDPVKGRFTISRDNSKNTVFLQMNSLRPNDTAIYYCAKNVGLYCAGGSCYSGQLDYWGQGTLVTVSS

SEQ ID NO: 6574 - protein, 20 aa, Artificial Sequence
  Synthetic
AKNVGLYCAGGSCYSGQLDY

SEQ ID NO: 6575 - protein, 108 aa, Artificial Sequence
  Synthetic
DIQMTQSPSSLSASVGDRVTVTCQASQDISNYLNWYQQKPGKAPKLLIYDASNLEAGVPSRFSGSGSGTHFTFTISSLQPEDIATYYCQQYDNLPPITFGQGTRLEIK

SEQ ID NO: 6576 - protein, 10 aa, Artificial Sequence
  Synthetic
QQYDNLPPIT

SEQ ID NO: 6577 - protein, 121 aa, Artificial Sequence; identical to SEQ ID NO: 305
  Synthetic

SEQ ID NO: 6578 - protein, 14 aa, Artificial Sequence
  Synthetic
ARVPPPQRLHPFDV

SEQ ID NO: 6579 - protein, 106 aa, Artificial Sequence; identical to SEQ ID NO: 306
  Synthetic

SEQ ID NO: 6580 - protein, 9 aa, Artificial Sequence
  Synthetic
QQYFRYSWT

SEQ ID NO: 6581 - protein, 124 aa, Artificial Sequence
  Synthetic
EVQLVQSGAEVKKPGESLKISCKGSGYSFTDYWIGWVRQMPGKGLEWMGIIFPGDSDTRYSPSFQGHVTISADKSISTAYLQWSSLKASDTAMYYCARLQSYDSYFYYYYMDVWGKGTTVTVSS

SEQ ID NO: 6582 - protein, 17 aa, Artificial Sequence
  Synthetic
ARLQSYDSYFYYYYMDV

SEQ ID NO: 6583 - protein, 107 aa, Artificial Sequence
  Synthetic
DIQMTQSPSTLSASVGDRVTITCRASQSISNWLAWYQQRPGNAPNLLIYKASTLESGVPSRFSGSGSGTEFTLTISSLQPDDFATYYCQQYKSYSHTFGQGTKLEIK

SEQ ID NO: 6584 - protein, 9 aa, Artificial Sequence
  Synthetic
QQYKSYSHT

SEQ ID NO: 6585 - protein, 122 aa, Artificial Sequence
  Synthetic
  misc_feature (33)..(33): Xaa can be any naturally occurring amino acid
EVQLVESGGNLVQPGGSLRLSCTISGIAVSSDXMHWVRQVAGEGLEWVSTIGSAGDTYYSDSVKGRFTMSRENAKNSLSLQMNSLRVGDTAVYYCARGVAVTGGLYYYYMDVWGKGTTVTVS

SEQ ID NO: 6586 - protein, 17 aa, Artificial Sequence
  Synthetic
ARGVAVTGGLYYYYMDV

SEQ ID NO: 6587 - protein, 108 aa, Artificial Sequence
  Synthetic
DIQMTQSPSSLSAFVGDRVTITCRASQNINSYLNWYQQKPGKAPKLLIYGASTLQSGVPSRISGSGSGTDYTLTISSLQPEDFATYYCQQSYESPPWTFGQGTKVEIK

SEQ ID NO: 6588 - protein, 10 aa, Artificial Sequence
  Synthetic
QQSYESPPWT

SEQ ID NO: 6589 - protein, 124 aa, Artificial Sequence
  Synthetic
QVQLVESGGGAVQPGRSLRLSCTASGFTFNTYGMHWVRQAPGKGLEWVALISYDGSDTYYADSVKGRFTISRDNSKNTLYLQMNSLRAEDTAVYYCAKNLALYGSGSYYYFDYWGQGTLVTVSS

SEQ ID NO: 6590 - protein, 17 aa, Artificial Sequence
  Synthetic
AKNLALYGSGSYYYFDY

SEQ ID NO: 6591 - protein, 107 aa, Artificial Sequence
  Synthetic
DIQMTQSPSSLSASVGDRVTITCQASQDISNYLNWYQQKPGKAPKLLIYDASNLETGVPSRFSGSGSGTDFTFTISSLQPEDIATYYCQQYESLPLTFGGGTKVQIK

SEQ ID NO: 6592 - protein, 9 aa, Artificial Sequence
  Synthetic
QQYESLPLT

SEQ ID NO: 6593 - protein, 122 aa, Artificial Sequence
  Synthetic
QVQLVQSGAEVKKPGASVKVSCKASRYTLTSFGITWVRQAPGQGLEWMGWISAYSSNTDYAQNLQGRITMTTDTSTSTAYMELRSLRSDDTAIYYCARVGVAGQYYYGMDVWGQGTTVTVSS

SEQ ID NO: 6594 - protein, 15 aa, Artificial Sequence
  Synthetic
ARVGVAGQYYYGMDV

SEQ ID NO: 6595 - protein, 108 aa, Artificial Sequence
  Synthetic
EIVLTQSPGTLSLSPGERATLSCRASQSVSSNYFAWYQQKPGQAPRLLIYGASSRATGIPDRFSASGSGTDFTLTISRLEPEDFAVYYCQQYGSSPWTFGQGSKVEIK

SEQ ID NO: 6596 - protein, 9 aa, Artificial Sequence
  Synthetic
QQYGSSPWT

SEQ ID NO: 6597 - protein, 121 aa, Artificial Sequence; identical to SEQ ID NO: 357
  Synthetic

SEQ ID NO: 6598 - protein, 15 aa, Artificial Sequence
  Synthetic
ARDYVLVPARSGMDV

SEQ ID NO: 6599 - protein, 107 aa, Artificial Sequence; identical to SEQ ID NO: 358
  Synthetic

SEQ ID NO: 6600 - protein, 9 aa, Artificial Sequence
  Synthetic
QQRSNWPYT

SEQ ID NO: 6601 - protein, 122 aa, Artificial Sequence; identical to SEQ ID NO: 351
  Synthetic

SEQ ID NO: 6602 - protein, 15 aa, Artificial Sequence
  Synthetic
ARDGTTMTPTDLLTD

SEQ ID NO: 6603 - protein, 108 aa, Artificial Sequence
  Synthetic
DIQMTQSPSSLSASVGDRVSITCRASQRISSYLNWYQQKPGKAPKLLIYAASSLQSGVPSRFSGSGSGTDFTLTISSLQPEDFATYYCQQSYSTPPLTFGPGTKVEIK

SEQ ID NO: 6604 - protein, 10 aa, Artificial Sequence
  Synthetic
QQSYSTPPLT

SEQ ID NO: 6605 - protein, 118 aa, Artificial Sequence
  Synthetic
EVQLVESGGGLIQPGGSLRLSCAASEFIVSSNYMSWVRQAPGKGLEWVSLIYPGGSTFYADSVKGRFTISRENSKNTLFLQMNSLRVEDTAVYFCARYLPYGDSAFDYWGQGTLVTVS

SEQ ID NO: 6606 - protein, 13 aa, Artificial Sequence
  Synthetic
ARYLPYGDSAFDY

SEQ ID NO: 6607 - protein, 107 aa, Artificial Sequence
  Synthetic
DIQMTQSPSSLSASVGDRVTITCRASQDINNYLAWYQQKPGKVPQLLIYAASTLQSGVPSRFSGSGSGTDFTLTISSLQPEDIATYYCQKYNSVPFTFGPGTKVDVK

SEQ ID NO: 6608 - protein, 9 aa, Artificial Sequence
  Synthetic
QKYNSVPFT

SEQ ID NO: 6609 - protein, 117 aa, Artificial Sequence; identical to SEQ ID NO: 327
  Synthetic

SEQ ID NO: 6610 - protein, 11 aa, Artificial Sequence
  Synthetic
ARDLVVWGMDV

SEQ ID NO: 6611 - protein, 107 aa, Artificial Sequence; identical to SEQ ID NO: 328
  Synthetic

SEQ ID NO: 6612 - protein, 9 aa, Artificial Sequence
  Synthetic
QQLNTYPYT

SEQ ID NO: 6613 - protein, 127 aa, Artificial Sequence
  Synthetic
QVQLVESGGGVVQPGRSLRLSCVASGFTFRNYVMHWVRQAPGKGLEWVAVILYDGSNHYFADSVKGRFTIARDNSKNTLYLQMSRLRVDDTAVYYCAKAGGSYCSGGNCYTNYLDYWGQGTLVTVSS

SEQ ID NO: 6614 - protein, 20 aa, Artificial Sequence
  Synthetic
AKAGGSYCSGGNCYTNYLDY

SEQ ID NO: 6615 - protein, 107 aa, Artificial Sequence
  Synthetic
DIQMTQSPSSLSASVGDRVTITCQASQDISNFLNWYQQKPGKAPNLLIYGASNLETGVPSRFSGSGSGTDFTFTISSLQPEDFATYYCQQYDNLPLTFGGGTKVEIK

SEQ ID NO: 6616 - protein, 9 aa, Artificial Sequence
  Synthetic
QQYDNLPLT

SEQ ID NO: 6617 - protein, 124 aa, Artificial Sequence
  Synthetic
QVQLVESGGGLVKPGGSLRLSCAASGFTFSDYYMSWIRQAPGKGLEWLSYISSTTSYTSYEDSVKGRFTISRDNAKNSLYLQMNSLRVEDTAVYYCARDRGSGSGSPLGWFDPWGQGTLVTVSS

SEQ ID NO: 6618 - protein, 17 aa, Artificial Sequence
  Synthetic
ARDRGSGSGSPLGWFDP

SEQ ID NO: 6619 - protein, 107 aa, Artificial Sequence
  Synthetic
DIQMTQSPSSLSASVGDRVTITCQASQDISNYLNWYQQKPGKAPKLLIYDASNLETGVPSRFSGSGSGTDFTFTISSLQPEDIATYYCQQYDNLPLTFGPGTKVDIK

SEQ ID NO: 6620 - protein, 9 aa, Artificial Sequence
  Synthetic
QQYDNLPLT

SEQ ID NO: 6621 - protein, 118 aa, Artificial Sequence
  Synthetic
QVQLVESGGGLVKPGGSLRLSCAASGFNLSDYYMSWIRQAPGKGLQWVSYISFSSGYANYADSVKGRFTISRDNAKNSLSLQMNSLRAEDTAMYYCAREGTSGWYVYWGQGTLVTVSS

SEQ ID NO: 6622 - protein, 11 aa, Artificial Sequence
  Synthetic
AREGTSGWYVY

SEQ ID NO: 6623 - protein, 108 aa, Artificial Sequence
  Synthetic
EIVLTQSPGTLSLSPGESATLSCRASQSLSSGNLAWYQQKPGQAPTLLIYGASSRATGIPDRFSGSGSGTDFILTINRLEPEDFAVYHCQQYGGSLVTFGQGTKLEIK

SEQ ID NO: 6624 - protein, 9 aa, Artificial Sequence
  Synthetic
QQYGGSLVT

SEQ ID NO: 6625 - protein, 120 aa, Artificial Sequence
  Synthetic
QVQLVQSGAEVKKPGASVKVSCKTSGYNFPSYGISWVRQAPGEGLEWMGWINPYNDNTNYAQRVQGRVTMTTDTSTGTAYMEVKSLRSDDTAVYYCARDGYGDYRAYDYWGLGTLVTVSS

SEQ ID NO: 6626 - protein, 13 aa, Artificial Sequence
  Synthetic
ARDGYGDYRAYDY

SEQ ID NO: 6627 - protein, 107 aa, Artificial Sequence
  Synthetic
DIQMTQSPSSLSASVGDRVTITCRASQSISSYLNWYQQKPGKAPKLLIYAASSLQSGVPSRFGGSGSGTDFTLTISSLQPEDFATYFCQQSFITPRTFGQGTKVEIK

SEQ ID NO: 6628 - protein, 9 aa, Artificial Sequence
  Synthetic
QQSFITPRT

SEQ ID NO: 6629 - protein, 124 aa, Artificial Sequence
  Synthetic
QVQLVQSGAEVKTPGASVKVSCKASGYTFTSYGISWVRQAPGQGLEWMGWVSSYNGNTNYAQKFQGRVTMTTDTSTNTVHMELWNLRSDDTAVYYCARVEYYYDSSGTYYFDHWGQGTLVTVSS

SEQ ID NO: 6630 - protein, 17 aa, Artificial Sequence
  Synthetic
ARVEYYYDSSGTYYFDH

SEQ ID NO: 6631 - protein, 109 aa, Artificial Sequence
  Synthetic
EIVMTQSPATLSVSPGERATLSCRASQSISSNVAWYQQKPGQAPRFLLYGASTRATGIPARFSGSGSGTEFTLTITSLQSEDFAVYYCQQYDDWPPKWTFGQGTKVEIK

SEQ ID NO: 6632 - protein, 11 aa, Artificial Sequence
  Synthetic
QQYDDWPPKWT

SEQ ID NO: 6633 - protein, 122 aa, Artificial Sequence
  Synthetic
EVQLVESGGGLIQPGGSLRLSCAASGFTVSSNYMTWARQAPGKGLEWVSVIYSGGTTYYADSVKGRFTISRDKSKSTLYLQMSSLRAEDTAVYYCAVRGFRELYYPHGMEVWGQGTTVTVSS

SEQ ID NO: 6634 - protein, 16 aa, Artificial Sequence
  Synthetic
AVRGFRELYYPHGMEV

SEQ ID NO: 6635 - protein, 106 aa, Artificial Sequence
  Synthetic
DIQMTQSPSSLSASVGDRVTITCQASQDITNYLNWYQQKPGKAPKLLIYDASTLEAGVPSRFSGSGSGTEFTFTISSLQPEDIATYYCQHYENLPPGFGPGTRVDF

SEQ ID NO: 6636 - protein, 9 aa, Artificial Sequence
  Synthetic
QHYENLPPG

SEQ ID NO: 6637 - protein, 122 aa, Artificial Sequence; identical to SEQ ID NO: 289
  Synthetic

SEQ ID NO: 6638 - protein, 15 aa, Artificial Sequence
  Synthetic
ARDLENVLIEVALQD

SEQ ID NO: 6639 - protein, 108 aa, Artificial Sequence; identical to SEQ ID NO: 290
  Synthetic

SEQ ID NO: 6640 - protein, 10 aa, Artificial Sequence
  Synthetic
QQSYTTLALT

SEQ ID NO: 6641 - protein, 119 aa, Artificial Sequence
  Synthetic
EVQLVESGGGLIQPGGSLRLSCAASILTVSRNYMSWVRQAPGKGLEWVSSIYSGGTTYYADSVKGRFTISRDDSKNTLYLQMNSLRAEDTAVYYCARPVVGGRAGMDVWGQGTTVTVSS

SEQ ID NO: 6642 - protein, 13 aa, Artificial Sequence
  Synthetic
ARPVVGGRAGMDV

SEQ ID NO: 6643 - protein, 107 aa, Artificial Sequence
  Synthetic
DIQMTQSPSSLSASVGDRVTITCQASQDINKYLNWYQQKPGKAPKLLIYDASNLETGVPSRFSGSGSGTDFTFTISSLQPEDIGTFYCLHNDNPPLTFGGGTKVEIK

SEQ ID NO: 6644 - protein, 9 aa, Artificial Sequence
  Synthetic
LHNDNPPLT

SEQ ID NO: 6645 - protein, 125 aa, Artificial Sequence
  Synthetic
QVQLQESGPGLVKPSQTLSLTCTVSGGSISSGDYYWSWIRQPPGKGLEWIGYIYYSGSTNYNPSLRSRVTISVDTSKNQFSLRLRSVTAADTAVYYCARDAIGSASYGVEYFQHWGQGTLVTVSS

SEQ ID NO: 6646 - protein, 17 aa, Artificial Sequence
  Synthetic
ARDAIGSASYGVEYFQH

SEQ ID NO: 6647 - protein, 109 aa, Artificial Sequence
  Synthetic
EIVLTQSPGTLSLSPGERATLSCRASQSVSSRYLAWYQQKPGQAPRLLIYGASSRATGIPDRFSGSGSGTEFTLTISRLEPEDFAVYYCQQYGSSPPYTFGQGTKLEIK

SEQ ID NO: 6648 - protein, 10 aa, Artificial Sequence
  Synthetic
QQYGSSPPYT

SEQ ID NO: 6649 - protein, 123 aa, Artificial Sequence
  Synthetic
QVQLVESGGGVVQPGRSLRLSCAASGFSFSTYGMHWVRQAPGKGLEWVAVISYDGSNKYSADSVKGRFTISRDNSKNTLYLQMNSLRAEDTAVYYCAKDIGGSYYLMYYFDYWGQGTLVTVSS

SEQ ID NO: 6650 - protein, 16 aa, Artificial Sequence
  Synthetic
AKDIGGSYYLMYYFDY

SEQ ID NO: 6651 - protein, 108 aa, Artificial Sequence
  Synthetic
DIQMTQSPSSLSAFVGDRVTITCQASQDIGNYLNWYQQKPGKPPKLLIYDASNLEAGVPSRFSGSGSGTDFTFTISSLQPEDIATYYCQQYDILPPITFGQGTRLEIK

SEQ ID NO: 6652 - protein, 10 aa, Artificial Sequence
  Synthetic
QQYDILPPIT

SEQ ID NO: 6653 - protein, 120 aa, Artificial Sequence
  Synthetic
  misc_feature (60)..(60): Xaa can be any naturally occurring amino acid
  misc_feature (65)..(65): Xaa can be any naturally occurring amino acid
  misc_feature (69)..(71): Xaa can be any naturally occurring amino acid
QVQLVESGGGLVKPGGSLRLSCAASGFTFSEYYMSWIRQAPGKGAEVGLCGSSSRTWRIXADFVXSLWXXXQDNAKNSLYLQMNSLRAEDTAVYYCAREQQLPINWFDTWGQGTLVTVSS

SEQ ID NO: 6654 - protein, 13 aa, Artificial Sequence
  Synthetic
AREQQLPINWFDT

SEQ ID NO: 6655 - protein, 107 aa, Artificial Sequence
  Synthetic
EIVLTQSPATLSLSPGERATLSCRASQSVSSYLAWYQQKPGQAPRLLIYDASNRATGIPARFSGSGSGTDFTLTITSLEPEDFAVYYCQQRSNWPSTFGGGTKVEIK

SEQ ID NO: 6656 - protein, 9 aa, Artificial Sequence
  Synthetic
QQRSNWPST

SEQ ID NO: 6657 - protein, 127 aa, Artificial Sequence
  Synthetic
EVQLVESGGGLVQPGGSLRLSCAASGFTFSTYDMHWVRQPTGKGLEWVSAIGSGGDTYYAGSVKGRFTISRESAKNSLYLQMNSLTAGDTAVYYCARGDHKSGWSEHRSFYFYYMDVWGKGTTVTVS

SEQ ID NO: 6658 - protein, 22 aa, Artificial Sequence
  Synthetic
ARGDHKSGWSEHRSFYFYYMDV

SEQ ID NO: 6659 - protein, 108 aa, Artificial Sequence
  Synthetic
DIQMTQSPSSLSASVGDRVTVTCRASQSISTYLNWYQLKPGKAPNLLIYGTSSLQVGVPSRFIGSGSGTDFTLTISSVQPEDFATYYCQQSYITTAYTFGQGTKLEIK

SEQ ID NO: 6660 - protein, 10 aa, Artificial Sequence
  Synthetic
QQSYITTAYT

SEQ ID NO: 6661 - protein, 123 aa, Artificial Sequence
  Synthetic
QVQLVESGGGVVQPGRSLRLSCAASGITFSHYGMHWVRQAPGKGLEWVALISSDGSKKYYADSVKGRFTISRDNSKNTVYLQMNSLRAEDTALYYCAKDLGYYYGPPYGPDYWGQGTLVTVSS

SEQ ID NO: 6662 - protein, 16 aa, Artificial Sequence
  Synthetic
AKDLGYYYGPPYGPDY

SEQ ID NO: 6663 - protein, 108 aa, Artificial Sequence
  Synthetic
DIQMTQSPSSLSASVGDRVTITCQASQDVSNSLNWYQQKPGKAPKLLIYGASNLETGVPSRFSGSGSGTDFSFTISSLQPEDIATYYCLQYDNFSMYTFGQGTKLEIK

SEQ ID NO: 6664 - protein, 10 aa, Artificial Sequence
  Synthetic
LQYDNFSMYT

SEQ ID NO: 6665 - protein, 127 aa, Artificial Sequence
  Synthetic
QVQLVESGGGVVQPGRSLRLSCAASGFTFSNYGMHWVRQAPGKGLEWVAVISYDGSNKYYADSVKGRFTISRDNSKNTLYLQMNSLRAEDTAVFYCAKQTAPYCSGGNCYSGYFDYWGQGTLVTVSS

SEQ ID NO: 6666 - protein, 20 aa, Artificial Sequence
  Synthetic
AKQTAPYCSGGNCYSGYFDY

SEQ ID NO: 6667 - protein, 105 aa, Artificial Sequence
  Synthetic
DIQMTQSPSSLFTSVGDRVSITCQASQDISNSLNWYQHKPGKAHKLLIYDASNLETGVPSRFSGSGSGTDFTFTISSLQPEDIATYYCHQYDNLLPRGGTQVEIK

SEQ ID NO: 6668 - skipped

SEQ ID NO: 6669 - protein, 116 aa, Artificial Sequence
  Synthetic
EVQLVESGGGLIQPGGSPRLSCAASGITVSSNYMSWVRQAPGKGLEWISVIYSGGSTFYADSVKGRFTISRDDSKNTLYLQMHSLRADDTAMYYCARAVWDAFDIWGQGTMVTVSS

SEQ ID NO: 6670 - protein, 10 aa, Artificial Sequence
  Synthetic
ARAVWDAFDI

SEQ ID NO: 6671 - protein, 109 aa, Artificial Sequence
  Synthetic
DIQLTQSPSFLSASVGDRVTITCRASQGISSYLAWYQQKPGKAPKLLIYTASTLQSGVPSRFSGSGSGTEFTLTISSLQPEDFATYYCQHLNSYPSPNTFGQGTKLEIK

SEQ ID NO: 6672 - protein, 11 aa, Artificial Sequence
  Synthetic
QHLNSYPSPNT

SEQ ID NO: 6673 - protein, 123 aa, Artificial Sequence
  Synthetic
QVQLVESGGGVVQPGRSLRLSCAASGFTFSTYGMHWVRQAPGKGLEWVTVISYDGSNKYYSDSVKGRFTISRDNSQNTLYLQMNSLSAEDTAVYYCAKSISPYTSGWYYFDYWGQGTLVTVSS

SEQ ID NO: 6674 - protein, 16 aa, Artificial Sequence
  Synthetic
AKSISPYTSGWYYFDY

SEQ ID NO: 6675 - protein, 107 aa, Artificial Sequence
  Synthetic
DIQMTQSPSSLSASVGDRVTITCQASQDISNYLNWYQQKPGKVPKLLIYDASSLETGVPSRFSGSGSGTNFTFTISSLQPEDIATYYCLQYNNLPLTFGGGTKVEIK

SEQ ID NO: 6676 - protein, 9 aa, Artificial Sequence
  Synthetic
LQYNNLPLT

SEQ ID NO: 6677 - protein, 122 aa, Artificial Sequence
  Synthetic
QVQLVESGGGVVQPGRSLRLSCAASGFTFSSYGMHWVRQAPGKGLEWVAVILSDGSGKLYADSVKGRFTISRDNSKSTLYLQMSSLRAEDSAVYYCARDGPPTSLVTCPDFWGQGTLVTVSS

SEQ ID NO: 6678 - protein, 15 aa, Artificial Sequence
  Synthetic
ARDGPPTSLVTCPDF

SEQ ID NO: 6679 - protein, 107 aa, Artificial Sequence
  Synthetic
DIQMTQSPSSLSASVGDRVTITCRASQSIGSYLNWYQQKPGKAPKLLIYAASSLQSGVPSRFSGSGSGTDFTLTISSLQREDFATYYCQQSYSTPPWTFGQGTTVDI

SEQ ID NO: 6680 - protein, 10 aa, Artificial Sequence
  Synthetic
QQSYSTPPWT

SEQ ID NO: 6681 - protein, 124 aa, Artificial Sequence
  Synthetic
EVQLVESGGGLVQPGGSLRVSCAASGFTFKSYDMHWVRQVTGKGLEWVSVIGTAGDTYYLDSVKGRFTISRENAKNSLYLQMNSLTAGDTAIYYCARGDMATRRPFYYYYMDVWGKGTAVTVSS

SEQ ID NO: 6682 - protein, 18 aa, Artificial Sequence
  Synthetic
ARGDMATRRPFYYYYMDV

SEQ ID NO: 6683 - protein, 108 aa, Artificial Sequence
  Synthetic
DIQMTQSPSSLSASVGDRVTITCRASQTISRYLNWYQQKPGEAPRLLIFAASTLQSGVPTRFSGSGSGTDFTLTITSLQPEDFATYWCQQSYSNPNLTFGGGTKVEIK

SEQ ID NO: 6684 - protein, 10 aa, Artificial Sequence
  Synthetic
QQSYSNPNLT

SEQ ID NO: 6685 - protein, 118 aa, Artificial Sequence
  Synthetic
EVQLVESGGGLIQPGGSLRLSCAASGLIVSSNYMNWVRQAPGKGLEWVSLIYSGGSTYYADSVKGRFTISRDNSKNTLYLQMNSLRPEDTAVYYCARDFSVVGAFDIWGQGTVVTVSS

SEQ ID NO: 6686 - protein, 12 aa, Artificial Sequence
  Synthetic
ARDFSVVGAFDI

SEQ ID NO: 6687 - protein, 109 aa, Artificial Sequence
  Synthetic
EIVLTQSPGTLSLSPGERATLSCRASQSLPSTYLAWYQQKPGQAPRLLIYGASSRATGIPDRFSGSGSGTDFTLTISRLEPEDFAVYYCQQYGTSPRVTFGPGTKVDIK

SEQ ID NO: 6688 - protein, 10 aa, Artificial Sequence
  Synthetic
QQYGTSPRVT

SEQ ID NO: 6689 - protein, 127 aa, Artificial Sequence
  Synthetic
QVQLVESGGGVVQPGKSLRLSCAASGFTFSRYGMHWVRRAPGKGLEWVAGISYDGSNKYYADSVKGRFTISRDNSKNTLYLQMNSLRAEDTALFFCAKVSGPYCSGHSCYSATFDYWGQGTLVTVSS

SEQ ID NO: 6690 - protein, 20 aa, Artificial Sequence
  Synthetic
AKVSGPYCSGHSCYSATFDY

SEQ ID NO: 6691 - protein, 107 aa, Artificial Sequence
  Synthetic
DIQMTQSPSSLSASVGDRVTIICQASQDISNYLNWYQQKPGKAPKLLIYDASNLETGVPSRFSGSGSGTDFAFTISGLQPEDIATYYCQQYDHLPPTFGQGTKVEIK

SEQ ID NO: 6692 - protein, 9 aa, Artificial Sequence
  Synthetic
QQYDHLPPT

SEQ ID NO: 6693 - protein, 122 aa, Artificial Sequence
  Synthetic
QVQLVQSGAEVKKPGSSVKVSCKASGDTFSIYAFSWVRQAPGQGLQWMGAIIPLLGTTNYAQKFLGRVTITADESTSTTFMELSSLTSEDTAVYHCATFHVAYGDYIPFDSWGQGTLVIVSS

SEQ ID NO: 6694 - protein, 15 aa, Artificial Sequence
  Synthetic
ATFHVAYGDYIPFDS

SEQ ID NO: 6695 - protein, 109 aa, Artificial Sequence
  Synthetic
EIVLTQSPGTLSLSPGERATLSCRASQSVSSSYLAWYQQKPGQAPRLLIYGASSRATGIPDRFSGSGSGTDFTLTISRLEPEDFAVYYCQQYGRSPTWTFGQGTKVEIE

SEQ ID NO: 6696 - protein, 10 aa, Artificial Sequence
  Synthetic
QQYGRSPTWT

SEQ ID NO: 6697 - protein, 129 aa, Artificial Sequence
  Synthetic
QVQLVQSGAEVKKPGASVKVSCKASGYTFTSYALHWVRQAPGQRLEWMGWINVGNGTTKYSQKFQGRVTITRDTSASTAYMELSSLRSDDTAVYYCARVPRGYYDRSGHYHGQDYFDYWGQGTLVTVSS

SEQ ID NO: 6698 - protein, 22 aa, Artificial Sequence
  Synthetic
ARVPRGYYDRSGHYHGQDYFDY

SEQ ID NO: 6699 - protein, 108 aa, Artificial Sequence
  Synthetic
EIVLTQSPGTLSLSPGERATLSCRASQSLSSNYLAWYQQKPGQAPRLLIYGASSRATAIPDRLSGSGSGTDFTLTISRLEPEDFAVYYCQQYGSSPITFGQGTRLEIK

SEQ ID NO: 6700 - protein, 9 aa, Artificial Sequence
  Synthetic
QQYGSSPIT

SEQ ID NO: 6701 - protein, 115 aa, Artificial Sequence
  Synthetic
EVQLVESGGGLIQPGGSLRLSCTASGLIVSSNYMSWIRQAPGKGLEWVSLIYSGGSTFYADSVKGRFTISRDNSKNTLFLHMNSLRAEDTAVYYCARHPYGTDVWGQGTTVTVSS

SEQ ID NO: 6702 - protein, 9 aa, Artificial Sequence
  Synthetic
ARHPYGTDV

SEQ ID NO: 6703 - protein, 107 aa, Artificial Sequence
  Synthetic
  misc_feature (33)..(33): Xaa can be any naturally occurring amino acid
DIQMTQSPSSLSASVGDRVTITCQASQDIVKYXNWYQQKSGKAPKLLIHDASNLETGVTSRFSGSGSGTHFTFTISSLQPEDLATYYCQQYDNLPITFGQGTRLEIK

SEQ ID NO: 6704 - protein, 9 aa, Artificial Sequence
  Synthetic
QQYDNLPIT

SEQ ID NO: 6705 - protein, 123 aa, Artificial Sequence
  Synthetic
QVQLVQSGAEVKKPGASVKVSCKASGDTFTSYDINWVRQATGQGLEWMGWMNRNSGNTDYAQKFQGRVTMTRNTSISTAYMELSSLRSEDTAVYYCVSRRWDPLRFYYYMDVWGKGTTVTVSS

SEQ ID NO: 6706 - protein, 16 aa, Artificial Sequence
  Synthetic
VSRRWDPLRFYYYMDV

SEQ ID NO: 6707 - protein, 111 aa, Artificial Sequence
  Synthetic
DIVMTQSPLSLPVTPGEPASISCRSSQSLLHSNGYNYLDWFLQKPGQSPQLLIYLGSNRASGVPDRFSGSGSGTDFTLKISRVEAEDVGVYYCMQALQTPPTFGGGTKVEI

SEQ ID NO: 6708 - protein, 9 aa, Artificial Sequence
  Synthetic
MQALQTPPT

SEQ ID NO: 6709 - protein, 120 aa, Artificial Sequence
  Synthetic
QVQLVESGGGVVQPGGSLRLSCAASGFTFRNYGMHWVRQAPGKGLECVAVIWYDGSNKYYGDSVKGRFTISRDNSKNTLYLQMNSLRAEDTALYYCARDNEITAIDIDYWGQGTLVTVSS

SEQ ID NO: 6710 - protein, 13 aa, Artificial Sequence
  Synthetic
ARDNEITAIDIDY

SEQ ID NO: 6711 - protein, 112 aa, Artificial Sequence
  Synthetic
DVVMTQSPLSLPVTLGQPASISCRSSQSLVHSDGNTYLNWFQQRPGQSPRRLIYKVSNRDSGVPDRFSGSGSGTYFTLKISRVEAEDVGVYYCMQGTHWPGTFGPGTKVDIK

SEQ ID NO: 6712 - protein, 9 aa, Artificial Sequence
  Synthetic
MQGTHWPGT

SEQ ID NO: 6713 - protein, 123 aa, Artificial Sequence
  Synthetic
QVQLVQSGAEVKKPGASVKVSCKASGYTFTSYDINWVRQAPGQGLEWMGWMNPNSGNTDYAQKFQGRFTMTRNTSISTAYMELSSLRSEDTAVYYCASRRWDPLTFYYYMVVWGKGTTVTVSS

SEQ ID NO: 6714 - protein, 16 aa, Artificial Sequence
  Synthetic
ASRRWDPLTFYYYMVV

SEQ ID NO: 6715 - protein, 112 aa, Artificial Sequence
  Synthetic
DIVMTQSPLSLPVTPGEPASISCRSSQSLLYSNGYNYLDWYLQKPGQSPQLLIYLGSNRASGVPDRFSGSGSGTDFTLKISRVEAEDVGVYFCMQALQTPPTFGGGTKVEIK

SEQ ID NO: 6716 - protein, 9 aa, Artificial Sequence
  Synthetic
MQALQTPPT

SEQ ID NO: 6717 - protein, 132 aa, Artificial Sequence
  Synthetic
QVQLVESGGGVVQPGRSLRLSCAASGFSFSSYAMHWVRQAPGKGLEWVAVISYDETNKYYGDSVKGRFTISRDNSKNTLYLQMNSLRAEDTAVYNCARVLGRGSVAGNIKSTLFGLDAFDIWGQGTMVTVSS

SEQ ID NO: 6718 - protein, 25 aa, Artificial Sequence
  Synthetic
ARVLGRGSVAGNIKSTLFGLDAFDI

SEQ ID NO: 6719 - protein, 109 aa, Artificial Sequence
  Synthetic
EIVMTQSPATLSVSPGESATLSCRASQSVSSNLAWYQQKPGQAPRLLIYGASTRATGIPARFSGSGSGTEFTLTISSLQSEDFAVYYCQQYNNWPPAFTFGPGTKVDIK

SEQ ID NO: 6720 - protein, 11 aa, Artificial Sequence
  Synthetic
QQYNNWPPAFT

SEQ ID NO: 6721 - protein, 123 aa, Artificial Sequence
  Synthetic
QMQLVQSGPEVKKPGTSVKVSCKASGFIFSSSAVQWVRQARGQRLEWIGWIVVGSGNTNYAQKFQERVTISRDMSTSTAYIHLSSLRSEDTAVYYCAAPSCTSTICYDAFNIWGQGTMVTVSS

SEQ ID NO: 6722 - protein, 16 aa, Artificial Sequence
  Synthetic
AAPSCTSTICYDAFNI

SEQ ID NO: 6723 - protein, 108 aa, Artificial Sequence
  Synthetic
EIVLTQSPGTLSLSQGERATLSCRASQSVRSSYLAWYQQKPGQAPRLLIYGASIRATGIPDRFSGSGSGTDFTLTISRLEPEDFAVYYCQHYGGSLFTFGPGTKVDIK

SEQ ID NO: 6724 - protein, 9 aa, Artificial Sequence
  Synthetic
QHYGGSLFT

SEQ ID NO: 6725 - protein, 129 aa, Artificial Sequence; identical to SEQ ID NO: 343
  Synthetic

SEQ ID NO: 6726 - protein, 22 aa, Artificial Sequence
  Synthetic
ASGLLWFETREISGAPDYGMAV

SEQ ID NO: 6727 - protein, 107 aa, Artificial Sequence; identical to SEQ ID NO: 344
  Synthetic

SEQ ID NO: 6728 - protein, 9 aa, Artificial Sequence
  Synthetic
QQSYSTPLT

SEQ ID NO: 6729 - protein, 117 aa, Artificial Sequence
  Synthetic
EVQLVESGGGLIQPGGSLRLSCAASGVTVSSNYMNWVRQAPGKGLEWVSVIYSGGSTFYADSVKGRFTISRDNSKNTLYLQMNSLRAEDTAVYYCARESYHSAFDIWGQGTMVTVSS

SEQ ID NO: 6730 - protein, 11 aa, Artificial Sequence
  Synthetic
ARESYHSAFDI

SEQ ID NO: 6731 - protein, 109 aa, Artificial Sequence
  Synthetic
DIQLTQSPSFLSASVGDRVTITCRASQGISSYLAWYQQKPGKAPKLLIYGASTLQSGVPSRFSGSGSGTEFTLTINSLQSEDFATYYCQQLNSYPPRDTFGQGTKLEIK

SEQ ID NO: 6732 - protein, 11 aa, Artificial Sequence
  Synthetic
QQLNSYPPRDT

SEQ ID NO: 6733 - protein, 129 aa, Artificial Sequence
  Synthetic
EVQLVQSGAEVKKPGESLRISCKGSGYSFTSYWISWVRQMPGKGLEWMGRIDPSDSYTNYSPPFQGHVTFSADKSISTAYLHWSSLKASDTAIYYCARPPRYYYDRSGYYVWEDYFDYWGQGTLVTVSS

SEQ ID NO: 6734 - protein, 22 aa, Artificial Sequence
  Synthetic
ARPPRYYYDRSGYYVWEDYFDY

SEQ ID NO: 6735 - protein, 108 aa, Artificial Sequence
  Synthetic
EIVLTQSPGTLSLSPGESATLSCRASQSVSSSYLAWYQQKPGQAPRLLIYGASSRATGIPDRFSGSGSGTDFTLTISRLEPEDFAVYYCQQYGSSPYTFGQGTKLEVK

SEQ ID NO: 6736 - protein, 9 aa, Artificial Sequence
  Synthetic
QQYGSSPYT

SEQ ID NO: 6737 - protein, 123 aa, Artificial Sequence
  Synthetic
EVQLVESGGGLVQPGGSLRLSCAASGFTFSTYDMHWVRQATGKGLEWVSAIGTAGDKYYPGSVKGRFTISRENAKNSLYLQMNSLRAGDTAVYYCVRAGYSSGWPLYWYFDLWGRGTLVSVSS

SEQ ID NO: 6738 - protein, 17 aa, Artificial Sequence
  Synthetic
VRAGYSSGWPLYWYFDL

SEQ ID NO: 6739 - protein, 109 aa, Artificial Sequence
  Synthetic
DIQMTQSPSSLSASVGDRVTITCRASQSISSYLNWYQQKPGKAPKFLIYAASSLQSGVPSRFSGSGSGTDFTLTISNLQPEDFATYYCQQSYRTPPEFTFGPGTKVDIK

SEQ ID NO: 6740 - protein, 11 aa, Artificial Sequence
  Synthetic
QQSYRTPPEFT

SEQ ID NO: 6741 - protein, 123 aa, Artificial Sequence
  Synthetic
QVQLVQSGAEVKKPGASVKVSCTASGYTFSSYYIHWVRQAPGQGLEWMGIINPGAGSTTYAQKFQGRVAMTTDTSTRTVYMELSSLRSDDTAVYYCGRDEAFLPSAIFVGDYWGQGTLVTVSS

SEQ ID NO: 6742 - protein, 16 aa, Artificial Sequence
  Synthetic
GRDEAFLPSAIFVGDY

SEQ ID NO: 6743 - protein, 109 aa, Artificial Sequence
  Synthetic
DIQMTQSPSSLSASVGDRVTITCRASQGIRNDLGWYQQKPGKAPKRLIYAASSLQSGVPSRFSGSGSGTEFTLTISSLQPEDFATYYCLQHNSYPHTWTFGQGTKVEIK

SEQ ID NO: 6744 - protein, 11 aa, Artificial Sequence
  Synthetic
LQHNSYPHTWT

SEQ ID NO: 6745 - protein, 119 aa, Artificial Sequence; identical to SEQ ID NO: 311
  Synthetic

SEQ ID NO: 6746 - protein, 12 aa, Artificial Sequence
  Synthetic
ARDGGGYDRFDH

SEQ ID NO: 6747 - protein, 107 aa, Artificial Sequence
  Synthetic
DIQMTQSPSSLSASVGDRVTITCQASQDISNLLNWYQQKAGKAPKLLIYDASNLETGVPSRFSGSGSGTDFTFTISSLQPEDIATYYCLQYDNLPLTFGQGTRLEIK

SEQ ID NO: 6748 - protein, 9 aa, Artificial Sequence
  Synthetic
LQYDNLPLT

SEQ ID NO: 6749 - protein, 128 aa, Artificial Sequence
  Synthetic
EVQLVESGGGLVQPGGSLRLSCAASGFTFNNYDMHWVRQGTGKRLQWVSVIGTSGDTYYSDSVKGRFTISRENAKNSLYLQMNSLRAGDTAVYYCVRGTTVVRGLIEKYYHYYVMDVWGQGTTVTVSS

SEQ ID NO: 6750 - protein, 22 aa, Artificial Sequence
  Synthetic
VRGTTVVRGLIEKYYHYYVMDV

SEQ ID NO: 6751 - protein, 108 aa, Artificial Sequence
  Synthetic
DIQMTQSPSSLSASVGDRVTITCRASQSISSYLNWYQQKIGKAPKLLIYAASSLQSGVPSRFSGSGSGTDFTLTISSLQPEDFATYYCQQSYSNPGWTFGQGTKVEIK

SEQ ID NO: 6752 - protein, 10 aa, Artificial Sequence
  Synthetic
QQSYSNPGWT

SEQ ID NO: 6753 - protein, 117 aa, Artificial Sequence
  Synthetic
EVQLVESGGGLFQPGGSLKLSCVASGLTVSANYMNWVRQAPGKGLEWVSVIYSGGSAFYADSVKGRFTISRDISKNTLFLQMNTLRAEDTAVYYCARDLVVYGMDVWGQGTTVIVSS

SEQ ID NO: 6754 - protein, 11 aa, Artificial Sequence
  Synthetic
ARDLVVYGMDV

SEQ ID NO: 6755 - protein, 107 aa, Artificial Sequence
  Synthetic
DIQLTQSPSFLSASVGDRVTITCRARQGISNFLAWYQQKPGRAPKLLIYGASTLQSGVPSRFSGSGSGTEFTLTISSLQPEDFATYYCQQLNSDPITFGQGTRLEIK

SEQ ID NO: 6756 - protein, 9 aa, Artificial Sequence
  Synthetic
QQLNSDPIT

SEQ ID NO: 6757 - protein, 124 aa, Artificial Sequence
  Synthetic
EVQLVESGGGLIQPGVSLRLSCAVSGFTVSRNYMSWVRQAPGKGLEWVSVIYPGGSTFYADSVKGRFTISRDNSKNTLHLQMNSLRAEDTAVYYCARDFYRPTTFRGEAKGDYWGQGTLVTVSS

SEQ ID NO: 6758 - protein, 18 aa, Artificial Sequence
  Synthetic
ARDFYRPTTFRGEAKGDY

SEQ ID NO: 6759 - protein, 107 aa, Artificial Sequence
  Synthetic
DIQMTQSPSSLSASVGDRVTITCQASQDINNYLNWYQQKPGEAPKLLIYDASNLETGVPSRFSGSGSGTDFTFTISSLQPEDIATYYCHQYDNLPRTFGQGTKVEIK

SEQ ID NO: 6760 - protein, 9 aa, Artificial Sequence
  Synthetic
HQYDNLPRT

SEQ ID NO: 6761 - protein, 120 aa, Artificial Sequence
  Synthetic
QVQLVESGGALVKPGGSLRLSCAASGFTFSDHYMSWIRQAPGRGLEWVSYISTSSSDTSYADSVKGRFTISRDNAKNSLFLQMNSLRAEDTAVYYCARDSEWLQFASFDYWGQGTLVTVS

SEQ ID NO: 6762 - protein, 14 aa, Artificial Sequence
  Synthetic
ARDSEWLQFASFDY

SEQ ID NO: 6763 - protein, 107 aa, Artificial Sequence
  Synthetic
EIVLTQSPGTLSLSPGERATLSCRASQSVSSSYLAWYQQKPGQAPRLVIYGAISRAAGIPDRFSGSGSETDFTLTISRLEPEDFAVYYCQQYGSSHTFGQGTRLEIK

SEQ ID NO: 6764 - protein, 8 aa, Artificial Sequence
  Synthetic
QQYGSSHT

SEQ ID NO: 6765 - protein, 123 aa, Artificial Sequence
  Synthetic
QVQLVESGGGVVQPGRSLRLSCAASGITFSHYGMHWVRQAPGKGLEWVALISSDGSKKYYADSVKGRFTISRDNSKSTLYLQMNSLRAEDTAIYYCAKDLGYYYGPPYGPDYWGQGTLVTVSS

SEQ ID NO: 6766 - protein, 16 aa, Artificial Sequence
  Synthetic
AKDLGYYYGPPYGPDY

SEQ ID NO: 6767 - protein, 108 aa, Artificial Sequence
  Synthetic
DIQMTQSPSSLSASVGDRVTITCQASQDVSNSLNWYQQKPGKAPKLLIYDASNLETGVPSRFSGSGSGTDFSFTISSLQPEDIATYYCLQYDNFSMYTFGQGTKLEIK

SEQ ID NO: 6768 - protein, 10 aa, Artificial Sequence
  Synthetic
LQYDNFSMYT

SEQ ID NO: 6769 - protein, 121 aa, Artificial Sequence
  Synthetic
QVQLVESGGNVVQPGRSLRLSCAASGFTFSNYGMHWIRQAPGKGLEWVAVISYDGSDKYYADSVKGRVTISRDNSKNTLYLQMNSLRAEDTAVYYCAKGGPYGDHVRSDYWGLGTLVTVSS

SEQ ID NO: 6770 - protein, 14 aa, Artificial Sequence
  Synthetic
AKGGPYGDHVRSDY

SEQ ID NO: 6771 - protein, 107 aa, Artificial Sequence
  Synthetic
DIQMTQSPSSLSASVGDRVTITCQASQDISNYLNWYQQKPGKVPKLLIYDASNLETGVPSRFSGSGSGTDFTFTISSLQPEDIATYYCQQFHNLPLTFGQGTKLEIK

SEQ ID NO: 6772 - protein, 9 aa, Artificial Sequence
  Synthetic
QQFHNLPLT

SEQ ID NO: 6773 - protein, 122 aa, Artificial Sequence; identical to SEQ ID NO: 307
  Synthetic

SEQ ID NO: 6774 - protein, 14 aa, Artificial Sequence
  Synthetic
ARHFADGSGRVVDS

SEQ ID NO: 6775 - protein, 108 aa, Artificial Sequence; identical to SEQ ID NO: 308
  Synthetic

SEQ ID NO: 6776 - protein, 10 aa, Artificial Sequence
  Synthetic
QQRINWPLYT

SEQ ID NO: 6777 - protein, 126 aa, Artificial Sequence
  Synthetic
QVQLVQSGAEVKKPGSSVKVSCKASGGDFTTYAITWVRQAPGQGLELMGGLIPLFGTANSAQKFQGRVTITADESTSTAYLELSSLSSEDTAVYYCARGRWRAAALSTLRTAFDYWGQGTLLTVSS

SEQ ID NO: 6778 - protein, 19 aa, Artificial Sequence
  Synthetic
ARGRWRAAALSTLRTAFDY

SEQ ID NO: 6779 - protein, 108 aa, Artificial Sequence
  Synthetic
EIVMTQSPATLSVSPGERVTLSCRASQSVSSNLAWYQQKPGQAPRLLIYGASTRATGIPARFSGSGSGTEFTLTISSLQSEDFAIYYCQQYNKWPMYTFGQGTKLEIK

SEQ ID NO: 6780 - protein, 10 aa, Artificial Sequence
  Synthetic
QQYNKWPMYT

SEQ ID NO: 6781 - protein, 122 aa, Artificial Sequence
  Synthetic
EVQLVESGGGLVQPGGSLRLSCSASGFTFTTYAMHWVRQAPGKGLEYVSTISSNGDSTYYADSVKGRFTISRDNSKNTLHLQMSSLRTEDTAVYYCVKDELGGYFGNYFDYWGQGTLVTVSS

SEQ ID NO: 6782 - protein, 15 aa, Artificial Sequence
  Synthetic
VKDELGGYFGNYFDY

SEQ ID NO: 6783 - protein, 110 aa, Artificial Sequence
  Synthetic
DIQMTQSPSSLSASVGDRVTITCRASQSISSYLNWYQQKPGKAPRLLIYAASYLHSGVPSRFSGSGSATDFTLTISSLQPEDFATYYCQQSYSAPPGPYTFGQGTKLEIK

SEQ ID NO: 6784 - protein, 12 aa, Artificial Sequence
  Synthetic
QQSYSAPPGPYT

SEQ ID NO: 6785 - protein, 120 aa, Artificial Sequence
  Synthetic
EVQLVESGGGLIKPGRSLRLSCTASGFTFGDYAMTWFRQAPGKGLEWVGFIRSKAYGGTTGYAASVKYRFTISRDDSKSIAYLQMDSLKTEDTAVYYCTRWDGWSQHDYWGQGTLVTVSS

SEQ ID NO: 6786 - protein, 11 aa, Artificial Sequence
  Synthetic
TRWDGWSQHDY

SEQ ID NO: 6787 - protein, 111 aa, Artificial Sequence
  Synthetic
DIVMTQSPLSLSVTPGEPASISCRSSQSLLHSNGNNYFDWYLQKPGQSPQLLIYLASNRASGVPDRFSGSGSGTDFTLKISRVEAEDVGVYYCMQVLQIPYTFGQGTKLEI

SEQ ID NO: 6788 - protein, 9 aa, Artificial Sequence
  Synthetic
MQVLQIPYT

SEQ ID NO: 6789 - protein, 126 aa, Artificial Sequence
  Synthetic
QVQLVQSGAEVKKPGSSVKVSCKASGGSFSTYAISWVRQAPGQGLEWMGGIIPAFGTANYAQKFQGRVTIAADESTSTAFMELSSLRSEDTAVYYCARGGCSSNSCYAAQYGMDVWGQGTTVTVSS

SEQ ID NO: 6790 - protein, 19 aa, Artificial Sequence
  Synthetic
ARGGCSSNSCYAAQYGMDV

SEQ ID NO: 6791 - protein, 107 aa, Artificial Sequence
  Synthetic
DIQMTQSPSSLSASIGNRVTITCQASQDINNYLNWYQQKPGKAPKLLIYDASNLETGVPSRFSGSGSGTDFTFTISSLQPEDIATYYCQQYDNPALTFGGGTKVEIK

SEQ ID NO: 6792 - protein, 9 aa, Artificial Sequence
  Synthetic
QQYDNPALT

SEQ ID NO: 6793 - protein, 120 aa, Artificial Sequence
  Synthetic
QVQLVQSGAEVKKPGASVKVSCKVSGYNLTELSMYWVRQAPGKGLEWMGGFDPEDGGPIHAQKFQGRVTMTEDPSTDTAYMELRSLRSEDTALYYCATGGLFMIRGLEIWGRGTLVSVSS

SEQ ID NO: 6794 - protein, 13 aa, Artificial Sequence
  Synthetic
ATGGLFMIRGLEI

SEQ ID NO: 6795 - protein, 109 aa, Artificial Sequence
  Synthetic
EIVLTQSPGTLSLSPGERATLSCRASQSISYTSLAWYQQKPGQAPRLLIFGASRGATGTPDRFSGSWSGTDFTLTISRLEPEDFAVYYCQQYGNSPRLSFGGGTKVEIK

SEQ ID NO: 6796 - protein, 10 aa, Artificial Sequence
  Synthetic
QQYGNSPRLS

SEQ ID NO: 6797 - protein, 118 aa, Artificial Sequence
  Synthetic
EVQLVESGGGLIQPGGSLRLSCAASGLIVSSNYMNWVRQAPGKGLEWVSLLYSGGSTYYADSVKGRFTISRDNSKNTLYLQMNSLRPEDTAVYYCARDLSVVGAFDIWGQGTVVTVSS

SEQ ID NO: 6798 - protein, 12 aa, Artificial Sequence
  Synthetic
ARDLSVVGAFDI

SEQ ID NO: 6799 - protein, 109 aa, Artificial Sequence
  Synthetic
EIVLTQSPGTLSLSPGERATLSCRASQSLPSTYLAWYQQKRGQAPRLLIYGASSRATGIPDRFSGSGSGTDFTLTISRLEPEDFAVYYCQQYGTSPRVTFGPGTKVDIK

SEQ ID NO: 6800 - protein, 10 aa, Artificial Sequence
  Synthetic
QQYGTSPRVT

SEQ ID NO: 6801 - protein, 118 aa, Artificial Sequence
  Synthetic
EVQLVESGGGLIQPGGSLRLSCAASGLTVSNNYVSWVRQGPGKGLEWVSVIYSDAKTYYADSVKGRFSISRDNSKNTVYLQMNSLRAEDTAVYHCARLPPHRGDRDYWGQGTLVTVSS

SEQ ID NO: 6802 - protein, 12 aa, Artificial Sequence
  Synthetic
ARLPPHRGDRDY

SEQ ID NO: 6803 - protein, 107 aa, Artificial Sequence
  Synthetic
DIQMTQSPSSLSASVGDRVTITCRASQGISDYLAWYQQKPGKVPNLLIYAASTLQSGVPSRFSGSGSGTDFTLTISGLQPEDVATYYCQKYDSTPLTFGGGTKVEIK

SEQ ID NO: 6804 - protein, 9 aa, Artificial Sequence
  Synthetic
QKYDSTPLT

SEQ ID NO: 6805 - protein, 122 aa, Artificial Sequence
  Synthetic
QVQLQESGPGLVKPSETLSLTCSVSGGSISSYYWSWIRQPPGKGLEWIGNIFYSGSTNYNPSLKSRVTISIDTSKDQFSLKLSSVTAADTAVYYCATYYYDSTGYSYGMDVWGQGTTVTVSS

SEQ ID NO: 6806 - protein, 16 aa, Artificial Sequence
  Synthetic
ATYYYDSTGYSYGMDV

SEQ ID NO: 6807 - protein, 107 aa, Artificial Sequence
  Synthetic
DIQMTQSPSSLSASIGDRVTITCRASQSIGSYLHWYQQRPGKAPKLLIYAVSNLQSGVPSRFSGRGSGTDFTLTVSSLQPEDFATYYCQQTYSSPQTFGQGTKVDIK

SEQ ID NO: 6808 - protein, 9 aa, Artificial Sequence
  Synthetic
QQTYSSPQT

SEQ ID NO: 6809 - protein, 125 aa, Artificial Sequence
  Synthetic
QVQLVESGGGVVQPGRSLRLSCAASGFMFSSYGMHWVRQAPGKGLEWVAVIYYDGSNKYYADSVKGRFTISRDNSKNTLYLQMNSLRAEDTAVYYCAKDGLPLRGSGSPYGMDVWGQGTMVTVSS

SEQ ID NO: 6810 - protein, 18 aa, Artificial Sequence
  Synthetic
AKDGLPLRGSGSPYGMDV

SEQ ID NO: 6811 - protein, 107 aa, Artificial Sequence
  Synthetic
DIQMTQSPSSLSASVGDRVTITCRASQSIITYLNWYQQKPGKAPKLLIYDASSLQSGVPSRFSGSGSGTDFTLTISNLQPEDFATYYCQQSYRTLLTFGGGTKVGIK

SEQ ID NO: 6812 - protein, 9 aa, Artificial Sequence
  Synthetic
QQSYRTLLT

SEQ ID NO: 6813 - protein, 121 aa, Artificial Sequence
  Synthetic
QVQLQQWGAGLLKPSETLSLTCAVYGGSFSGYFWSWIRQPPGKGLEWIGEIDHNGVTNYNASLRSRVTISLDTSKNQFSLNLISLTAADTALYFCAIINNSGWRYDAFDIWGQGTMVTVSS

SEQ ID NO: 6814 - protein, 15 aa, Artificial Sequence
  Synthetic
AIINNSGWRYDAFDI

SEQ ID NO: 6815 - protein, 107 aa, Artificial Sequence
  Synthetic
DIQMTQSPSSLSASVGDRVTITCRASQSISSFLNWYQQKPGKAPKLLIYAASSLQSGVPSRFSGSGSGTDFTLTIRSLQPEDFATYYCQQSYFTPRAFGHGTKVEMK

SEQ ID NO: 6816 - protein, 9 aa, Artificial Sequence
  Synthetic
QQSYFTPRA

SEQ ID NO: 6817 - protein, 127 aa, Artificial Sequence
  Synthetic
QVQLVQSGAEVKKPGSSVKVSCKASGGTFSIYAINWLRQAPGQGLEWMGGIIPISGTANYEQKLQGRLTITADESTSTAYMELSSLRSEDTALYYCARTGRSYYSDNSGYYPYFDYWGQGTLVTVSS

SEQ ID NO: 6818 - protein, 20 aa, Artificial Sequence
  Synthetic
ARTGRSYYSDNSGYYPYFDY

SEQ ID NO: 6819 - protein, 106 aa, Artificial Sequence
  Synthetic
DIQMTQSPSSLSASVGDRVTITCRASQSISNYLNWYQQKPGKAPKLLIYAASSLQSGVPSRFSGSGSGTDFTLTISSLQPEDFATYYCQQSYRTITFGGGTKVEIK

SEQ ID NO: 6820 - protein, 8 aa, Artificial Sequence
  Synthetic
QQSYRTIT

SEQ ID NO: 6821 - protein, 129 aa, Artificial Sequence
  Synthetic
QVQLVESGGGVVQPGKSLRLSCAASGFTFSVYGLHWVRQAPDKGLEWVATISYDGNNKYYADSVKGRFTIFRDYSKNTLYLQMNSLRPEDTALYYCAKDHSSLSGAFGDLIGSGPVDPWGQGTLVTVSS

SEQ ID NO: 6822 - protein, 22 aa, Artificial Sequence
  Synthetic
AKDHSSLSGAFGDLIGSGPVDP

SEQ ID NO: 6823 - protein, 109 aa, Artificial Sequence
  Synthetic
EIVMTQSPATLSVSPGERATLSCRAGQNVSSNLAWYQQKPGQAPRLLIYGASTRAAGIPARFSGSGSGTEFTLTISILQSEDFAVYYCQQYNNRPRGYTFGQGTKLEIK

SEQ ID NO: 6824 - protein, 11 aa, Artificial Sequence
  Synthetic
QQYNNRPRGYT

SEQ ID NO: 6825 - protein, 117 aa, Artificial Sequence
  Synthetic
EVQLVESGGGWIQPGGSLRLSCAASGITVSSNYMSWVRQAPGKGLEWVSVIYAGGSTFYADSVKGRFTISRDNSKNTLYLQMNSVRAEDTAVYYCAREIYDDVLDTWGQGTMVTVSS

SEQ ID NO: 6826 - protein, 11 aa, Artificial Sequence
  Synthetic
AREIYDDVLDT

SEQ ID NO: 6827 - protein, 106 aa, Artificial Sequence
  Synthetic
DIQLTQSPSSLSASVGDRVTITCRASQGISSYLAWYQQKPGKAPKLLIYAASTLQSGVPSRFSGSGSGTEFTLTISSLQPEDLATYYCQQLNSYLHTFGQGTKLEI

SEQ ID NO: 6828 - protein, 9 aa, Artificial Sequence
  Synthetic
QQLNSYLHT

SEQ ID NO: 6829 - protein, 120 aa, Artificial Sequence
  Synthetic
EVQLVESGGGLVQPGGSLRLSCAASGFTFSNYDMHWVRQVTGKGLEWVSVIGTEGDTHYSDSVKGRFTISRENAKKSLYLQMNSLRAGDTAVYYCARDLGSGWVWVMDVWGQGTTVTVSS

SEQ ID NO: 6830 - protein, 14 aa, Artificial Sequence
  Synthetic
ARDLGSGWVWVMDV

SEQ ID NO: 6831 - protein, 108 aa, Artificial Sequence
  Synthetic
DIQMTQSPSSLSASVGDRVTITCRASQSISGYLNWYQQKPGKAPKLLIYAASNLQSGVPSRFSGSGSGTDFTLTISSLQPEDFATYYCQQSYSNPPLTFGGGTKVEIK

SEQ ID NO: 6832 - protein, 10 aa, Artificial Sequence
  Synthetic
QQSYSNPPLT

SEQ ID NO: 6833 - protein, 124 aa, Artificial Sequence
  Synthetic
QVQLVQSGAEVKKPGSSVKVSCKASGGTFSSYAIIWVRQAPGQGLEWMGGIIPIFGTANYAQNFQGRVTITADESTSTAYMELNSLRSEDTALYYCAAAYYYDSSGILGGDDYWGQGTLVTVSS

SEQ ID NO: 6834 - protein, 17 aa, Artificial Sequence
  Synthetic
AAAYYYDSSGILGGDDY

SEQ ID NO: 6835 - protein, 106 aa, Artificial Sequence
  Synthetic
EIVLTQSPATLSLSPGERATLSCRASQSVSNYLAWYQQKPSQAPRLLIFDASHRATGIPARFSGSGSGTDFTLTISSLEPEDFAVYYCQHRYNWLTFGGGTKVEIK

SEQ ID NO: 6836 - protein, 8 aa, Artificial Sequence
  Synthetic
QHRYNWLT

SEQ ID NO: 6837 - protein, 118 aa, Artificial Sequence
  Synthetic
QVQLVQSGAEVKKPGSSVKVSCKASGGTFNSYAISWVRQAPGQGLEWMGGIIPIFGTANYAQKFQGRVTITADESTSTAYMELSSLRSEDTAVYFCATTFQWDLLVYWGQGTLVTVSS

SEQ ID NO: 6838 - protein, 11 aa, Artificial Sequence
  Synthetic
ATTFQWDLLVY

SEQ ID NO: 6839 - protein, 108 aa, Artificial Sequence
  Synthetic
DIQMTQSPSSLSASVGDRVTITCQASQDISNYLNWYQQKPGKAPKLLIYDASNLEIGVPSRFSGSGSGTDFTFTISSLQPEDIATYYCQQYDHLPIFTFGPGTKVDVK

SEQ ID NO: 6840 - protein, 10 aa, Artificial Sequence
  Synthetic
QQYDHLPIFT

SEQ ID NO: 6841 - protein, 125 aa, Artificial Sequence
  Synthetic
EVQLVESGGGLVQPGGSLKLSCAASGFTFSGSAMHWVRQASGKGLEWVGRIRNKANSYATAYGASVRGRFTVSRDDSKNTAYLQMNSLKIEDTAVYYCTKDIAAGIPALNWFDSWGQGTLVTVSS

SEQ ID NO: 6842 - protein, 16 aa, Artificial Sequence
  Synthetic
TKDIAAGIPALNWFDS

SEQ ID NO: 6843 - protein, 109 aa, Artificial Sequence
  Synthetic
EIVLTQSPATLSLSPGERATLSCRASQSVSSYLAWYQQKPGQAPRLLIYDASNRATGIPARFSGSGSGTDFTLTISSLEPEDFAVYYCQQHTNWPPRITFGGGTKVEIK

SEQ ID NO: 6844 - protein, 11 aa, Artificial Sequence
  Synthetic
QQHTNWPPRIT

SEQ ID NO: 6845 - protein, 121 aa, Artificial Sequence
  Synthetic
QVQLVESGGGVVQPGRSLRLSCAASGFTFSNYGIHWVRQAPGKGLEWVAVISYDGSDKYYADSVKGRFTISRDNSKNTLYLQMNSLRAEDTAVYYCAKGGPYGDHVRSDYWGQGTLVTVSS

SEQ ID NO: 6846 - protein, 14 aa, Artificial Sequence
  Synthetic
AKGGPYGDHVRSDY

SEQ ID NO: 6847 - protein, 104 aa, Artificial Sequence
  Synthetic
  misc_feature (87)..(87): Xaa can be any naturally occurring amino acid
DIQMTQSPSSLSASVGDRVTITCQASQDISNYLNWYQQKPGKAPKLLIYDASYLETGVPSRFSGSGSGTHFTFTISSLQPEDIATYXSQQYEILPLTFGQGTKM

SEQ ID NO: 6848 - protein, 9 aa, Artificial Sequence
  Synthetic
QQYEILPLT

SEQ ID NO: 6849 - protein, 124 aa, Artificial Sequence
  Synthetic
EVQLVESGGGLVQPGGSLRLSCAASGFTFSSYDMHWVRQATGKRLEWVSLIGTAGDTYYPASVKGRFTISRENAKNSLYLQMNSLRAGDTAVYYCARVSYYYGSSGYSSYFDLWGRGTLVTVSS

SEQ ID NO: 6850 - protein, 18 aa, Artificial Sequence
  Synthetic
ARVSYYYGSSGYSSYFDL

SEQ ID NO: 6851 - protein, 109 aa, Artificial Sequence
  Synthetic
DIQMTQSPSSLSASVGDRVTITCRASQRISSYLNWYQQKPGKAPKLLIYAASSLQSGVPSRFSGSGSGTDFTLTISSLQPEDFATYYCQQSYSNPPEDTFGQGTKLEIK

SEQ ID NO: 6852 - protein, 11 aa, Artificial Sequence
  Synthetic
QQSYSNPPEDT

SEQ ID NO: 6853 - protein, 121 aa, Artificial Sequence; identical to SEQ ID NO: 303
  Synthetic

SEQ ID NO: 6854 - protein, 14 aa, Artificial Sequence
  Synthetic
ARVPPPQRLHPFDV

SEQ ID NO: 6855 - protein, 106 aa, Artificial Sequence; identical to SEQ ID NO: 304
  Synthetic

SEQ ID NO: 6856 - protein, 9 aa, Artificial Sequence
  Synthetic
QQYFRYSWT

SEQ ID NO: 6857 - protein, 121 aa, Artificial Sequence; identical to SEQ ID NO: 6769
  Synthetic

SEQ ID NO: 6858 - protein, 14 aa, Artificial Sequence
  Synthetic
AKGGPYGDHVRSDY

SEQ ID NO: 6859 - protein, 107 aa, Artificial Sequence; identical to SEQ ID NO: 6771
  Synthetic

SEQ ID NO: 6860 - protein, 9 aa, Artificial Sequence
  Synthetic
QQFHNLPLT

SEQ ID NO: 6861 - protein, 126 aa, Artificial Sequence
  Synthetic
  misc_feature (65)..(65): Xaa can be any naturally occurring amino acid
  misc_feature (76)..(76): Xaa can be any naturally occurring amino acid
QVQLQESGPGLVKPSQTLSFTCIVCGGSISSGGYYWSWIRQHPGKGLEWIGYIYYSGNTYYTPSXKSGVTISVDTXKNQFSLKLSSVTAADTALYYCARDSYSSSGYPSGGWFDPWGQGTLVTVSS

SEQ ID NO: 6862 - protein, 18 aa, Artificial Sequence
  Synthetic
ARDSYSSSGYPSGGWFDP

SEQ ID NO: 6863 - protein, 108 aa, Artificial Sequence
  Synthetic
DIQMTQSPSSLSASVGDRVTITCRASQSISSYLNWYQQKPGKAPKLLIYAASSLQSGVPSRFSGSGSGTDFTLTISSLQPEDFATYYCQQSYSSPPWTFGQGTKVEIK

SEQ ID NO: 6864 - protein, 10 aa, Artificial Sequence
  Synthetic
QQSYSSPPWT

SEQ ID NO: 6865 - protein, 128 aa, Artificial Sequence
  Synthetic
EVQLVESGGGLVKPGRSLRLSCTASGTASGFIFGDYAVNWFRQAPGKGLEWVGFIRSKPYGGTTQYAASVRGRFTISRDDSKSTAYLQMNSLKIEDTAVYYCTQPPGYCSGGRCYFASWGQGTLVTVS

SEQ ID NO: 6866 - protein, 16 aa, Artificial Sequence
  Synthetic
TQPPGYCSGGRCYFAS

SEQ ID NO: 6867 - protein, 106 aa, Artificial Sequence
  Synthetic
EIVMTQSPATLSVSPGERATLSCRASQSVSSNLAWYQQKPGQAPRLLIYDSSTRATGIPARFSGSGSGTDFILTISGLQSEDFAVYYCQQYDNWHSFGQGTKVEIK

SEQ ID NO: 6868 - protein, 8 aa, Artificial Sequence
  Synthetic
QQYDNWHS

SEQ ID NO: 6869 - protein, 118 aa, Artificial Sequence
  Synthetic
EVQLVESGGGLIQPGGSLRLSCAASGLTVSSNYMSWVRQAPGKGLEWVSVIYSGGSTFYADSVKDRFTISRDNEKNTLYLQMNSLRAEDTAVYYCARDLEVAGGFDCWGQGTLVTVSS

SEQ ID NO: 6870 - protein, 12 aa, Artificial Sequence
  Synthetic
ARDLEVAGGFDC

SEQ ID NO: 6871 - protein, 108 aa, Artificial Sequence
  Synthetic
DIQLTQSPSFLSASVGDRVTITCRASQGISSYLAWYQQKPGKAPKLLIYAASTLQSGVPSRFSGSGSGTEFTLTISSLQPEDFATYYCQQLNDYPSITFGQGTRLEIK

SEQ ID NO: 6872 - protein, 10 aa, Artificial Sequence
  Synthetic
QQLNDYPSIT

SEQ ID NO: 6873 - protein, 120 aa, Artificial Sequence
  Synthetic
EVQLVQSGAEVKKPGESLKISCEGSGYRFTTYWIAWVRQMPGKGLEWMGIIYCGDSDTRYNPSFQGEVSISVDKSISTAYLQWSSLKASDTAMYYCARSRSGIHDAFDMWGQGTMVTVSS

SEQ ID NO: 6874 - protein, 13 aa, Artificial Sequence
  Synthetic
ARSRSGIHDAFDM

SEQ ID NO: 6875 - protein, 106 aa, Artificial Sequence
  Synthetic
DIQMTQSPSSLSASVGDRVTITCQASQDISNYLNWYQQKPGKAPKLLIYDASNLETGVPSRFSGSGSGTDFTFTITSLQPEDIATYYCQQYDNLPLFGPGTKVDIK

SEQ ID NO: 6876 - protein, 8 aa, Artificial Sequence
  Synthetic
QQYDNLPL

SEQ ID NO: 6877 - protein, 119 aa, Artificial Sequence
  Synthetic
EVQLVESGGGLVQPGGSLRLSCAASGFTFSSYDMHWVRQTTGKRLEWVSVIGTAGDTYYADSVKGRFTISRENAKSSLYLQMNSLRAGDTAVYYCARDIGSIWPQFDPWGQGTLVIVSS

SEQ ID NO: 6878 - protein, 13 aa, Artificial Sequence
  Synthetic
ARDIGSIWPQFDP

SEQ ID NO: 6879 - protein, 108 aa, Artificial Sequence
  Synthetic
DIQMTQSPSSLSASVGDRVTITCRASQYISSYLNWYQQRSGKAPKLLIYAASTLQSGVPSRFSGSGSGTDFTLTISSLQAEDFATYYCQQSYTTVALTFGGGTKVEIK

SEQ ID NO: 6880 - protein, 10 aa, Artificial Sequence
  Synthetic
QQSYTTVALT

SEQ ID NO: 6881 - protein, 122 aa, Artificial Sequence
  Synthetic
EVQLLESGGGLVQPGGSLRLSCAASGFTFSSYAMSWVRQAPGKGLEWVSAISGSGDSTYYADSVKGRFTISRDSSKNTLYLQMNSLRAEDTAVYYCVMRYYDILTGPWTPHWGQGTLVTVSS

SEQ ID NO: 6882 - protein, 15 aa, Artificial Sequence
  Synthetic
VMRYYDILTGPWTPH

SEQ ID NO: 6883 - protein, 108 aa, Artificial Sequence
  Synthetic
DIQMTQSPSSLSASVGDRVTITCQASQDISNYLNWYQQKPGKAPELLIYDASNLEIGVPSRFSGSGSGTDFTFTISSLQPEDIATYYCQQYDNLPPLTFGGGTKVEIK

SEQ ID NO: 6884 - protein, 10 aa, Artificial Sequence
  Synthetic
QQYDNLPPLT

SEQ ID NO: 6885 - protein, 122 aa, Artificial Sequence
  Synthetic
QVQLQESGPGLVKPSETLSLTCTVSGGSISSYYWSWIRQPPGKGLEWIGYIFYSGSTNYNPSLRSRVTISVDTSKNQFSLKLSSLTAADTAVYYCARDLGRSSGWPDAFDIWGRGTMVTVSS

SEQ ID NO: 6886 - protein, 16 aa, Artificial Sequence
  Synthetic
ARDLGRSSGWPDAFDI

SEQ ID NO: 6887 - protein, 107 aa, Artificial Sequence
  Synthetic
EIVLTQSPATLSLSPGERATLSCRASQSVSSYLDWYQQKAGQPPRLLIYDVSNRATGIPARFSGSGSGTDFTLTISSLEPEDFAVYSCQQRSNWPGTFGQGTKLEIK

SEQ ID NO: 6888 - protein, 9 aa, Artificial Sequence
  Synthetic
QQRSNWPGT

SEQ ID NO: 6889 - protein, 124 aa, Artificial Sequence
  Synthetic
EVQLVESGGGLVQPGGSLRLSCAASGFTFSSYSMNWVRQAPGKGLEWVSYISSSSSTIYYADSVKGRFTISRDTAKNSLYLQMNSLRDEDTAVYYCARDTGFWSGNFPGLFDYWGQGTLVTVSS

SEQ ID NO: 6890 - protein, 17 aa, Artificial Sequence
  Synthetic
ARDTGFWSGNFPGLFDY

SEQ ID NO: 6891 - protein, 108 aa, Artificial Sequence
  Synthetic
DIQMTQSPSSLSASVGDRVTITCQASQDISNYLNWYQQKPGKAPKLLIYDASNLETGVPSRFSGSGSGTDFTFTISSLQPEDIATYYCQHYDTLPPVTFGQGTRLDIK

SEQ ID NO: 6892 - protein, 10 aa, Artificial Sequence
  Synthetic
QHYDTLPPVT

SEQ ID NO: 6893 - protein, 123 aa, Artificial Sequence
  Synthetic
QVQLVQSGAEVKKPGASVKVSCTASGYTFSSYYIHWVRQAPGQGLEWMGIINPGAGSTSYAQKFQGRVAMTTDTSTRTVYMELSSLRSDDTAVYYCARDEAFLPSAIFVGDYWGQGTLVTVSS

SEQ ID NO: 6894 - protein, 16 aa, Artificial Sequence
  Synthetic
ARDEAFLPSAIFVGDY

SEQ ID NO: 6895 - protein, 109 aa, Artificial Sequence
  Synthetic
DIQMTQSPSSLSASVGDRVTITCRASQGIRNDLGWYQQKPGKAPKRLIYAASNLQSGVPSRFSGSGSGTEFTLTISSLQPEDFATYYCLQHSTYPHTWTFGQGTKVEIK

SEQ ID NO: 6896 - protein, 11 aa, Artificial Sequence
  Synthetic
LQHSTYPHTWT

SEQ ID NO: 6897 - protein, 122 aa, Artificial Sequence
  Synthetic
QVQLQESGPGLVKPSETLSLTCTVSGASISSYYWSWIRQPPGKGLEWIGYIYYSGSTNYNPSLKSRVTISLDTSKNQFSLQLSSVTAADTAVYYCATYYFDNSGYSYGLDVWGQGTTVTVSS

SEQ ID NO: 6898 - protein, 16 aa, Artificial Sequence
  Synthetic
ATYYFDNSGYSYGLDV

SEQ ID NO: 6899 - protein, 107 aa, Artificial Sequence
  Synthetic
DIQMTQSPSSLSASVGDRVTIACRASQSISSYLHWYQQQPGKAPKLLIYAVTNLQSGVPSRFSGSGSGTDFTLTISSLQPEDFATYYCQQSYSLPQTFGQGTKVEIK

SEQ ID NO: 6900 - protein, 9 aa, Artificial Sequence
  Synthetic
QQSYSLPQT

SEQ ID NO: 6901 - protein, 123 aa, Artificial Sequence
  Synthetic
QVQLVESGGGVVQPGRSLRLSCAASGFTFSSYAMHWVRQAPGKGLEWVAVILYDGSNKYYADSVKGRFTISRDNSKNTLYLQMNSLRAEDTAVYYCARDQDLDTAMVTLFDYWGQGTLVTVSS

SEQ ID NO: 6902 - protein, 16 aa, Artificial Sequence
  Synthetic
ARDQDLDTAMVTLFDY

SEQ ID NO: 6903 - protein, 108 aa, Artificial Sequence
  Synthetic
DIQMTQSPSSLSASVRDRVTITCRASQSISSYLNWYQQKPGKAPKLLIYAASSLQSGVPSRFSGSGSGTDFTLTISSLQPEDLATYYCQQSYSTPPWTFGQGTKVEIK

SEQ ID NO: 6904 - protein, 10 aa, Artificial Sequence
  Synthetic
QQSYSTPPWT

SEQ ID NO: 6905 - protein, 123 aa, Artificial Sequence
  Synthetic
QVQLQQWGAGLLKPSETLSLTCAVSGGSLSGFYWTWIRQPPGKGLEWIGETNHFGSTDYKASLKSRVTISVGMSRNQFSLKVTSLTAADTAVYYCARKPLLYSDFSPGAFDIWGQGTMIVVSS

SEQ ID NO: 6906 - protein, 17 aa, Artificial Sequence
  Synthetic
ARKPLLYSDFSPGAFDI

SEQ ID NO: 6907 - protein, 107 aa, Artificial Sequence
  Synthetic
EIVLTQSPGTLSLSPGERATLSCRASQTLTANYLAWYQQKPGQAPRLLIYGASKRAAGIPDRFSGSGSGTDFTLSITRLEPEDFAVYYCQQYHTTPRTFGGGTKVEI

SEQ ID NO: 6908 - protein, 9 aa, Artificial Sequence
  Synthetic
QQYHTTPRT

SEQ ID NO: 6909 - protein, 119 aa, Artificial Sequence
  Synthetic
EVQLVESGGGLIQPGGSLRLSCAASGLTVSSNYMSWVRQAPGKGLEWVSVLYSGGSSFYADSVKGRFTISRDNSKNTLYLQMNSLRAEDTAVYYCARESGDTTMAFDYWGQGTLVTVSS

SEQ ID NO: 6910 - protein, 13 aa, Artificial Sequence
  Synthetic
ARESGDTTMAFDY

SEQ ID NO: 6911 - protein, 107 aa, Artificial Sequence
  Synthetic
DIQLTQSPSFLSASVGDRVTITCRASQGISSYLAWYQQKPGKAPKLLIYAASTLQSGVPSRFSGSGSGTEFTLTISSLQPEDFATYYCQQLNSDSYTFGQGTKLEIK

SEQ ID NO: 6912 - protein, 9 aa, Artificial Sequence
  Synthetic
QQLNSDSYT

SEQ ID NO: 6913 - protein, 126 aa, Artificial Sequence
  Synthetic
QVQLVESGGGVVQPGRSLRLSCAASGFTFSTYGMHWVRQAPGKGLEWVAVISYDGSNKYYADSVKGRFTISRDNSKNTLYLQMNSLRAEDTAVYYCAKGGLYDSSGYYPHYGMDVWGQGTTVTVSS

SEQ ID NO: 6914 - protein, 19 aa, Artificial Sequence
  Synthetic
AKGGLYDSSGYYPHYGMDV

SEQ ID NO: 6915 - protein, 107 aa, Artificial Sequence
  Synthetic
DIQMTQSPSSLSASVGDRVTITCQASQDINNYLNWYQQKPGKAPKVLIYDASNLETGVPSRFSGSGSGTDFTFTISSLQPEDFATYYCQQYDNLPLAFGGGTKVEIK

SEQ ID NO: 6916 - protein, 9 aa, Artificial Sequence
  Synthetic
QQYDNLPLA

SEQ ID NO: 6917 - protein, 116 aa, Artificial Sequence
  Synthetic
EVQLVESGGGLIQPGGSLRLSCAASGVTVSRNYMSWVRQAPGKGLEWVSVIYSGGSTYYADSVKGRFTISRDNSKNTLYLQMNSLRAEDTAVYYCARDLSAAFDIWGQGTMVTVSS

SEQ ID NO: 6918 - protein, 10 aa, Artificial Sequence
  Synthetic
ARDLSAAFDI

SEQ ID NO: 6919 - protein, 107 aa, Artificial Sequence
  Synthetic
DIQLTQSPSFLSASVGDRVTITCRASQGISSYLAWYQQKPGKAPKLLIYAASTLQSGVPSRFSGSGSGTEFTLTISSLQPEDFATYYCQQLNSYPPAFGQGTRLEIK

SEQ ID NO: 6920 - protein, 9 aa, Artificial Sequence
  Synthetic
QQLNSYPPA

SEQ ID NO: 6921 - protein, 125 aa, Artificial Sequence
  Synthetic
QVQLVESGGGVVQPGRSLRLSCAASGFTFSNFGMHWVRQAPGKGLEWVAVIWYDGSNKYYADSVKGRFTISRDNSKNTLYLQMNSLRAEDTAVYYCARGVNPDDILTGVDAFDIWGQGTMVTVSS

SEQ ID NO: 6922 - protein, 18 aa, Artificial Sequence
  Synthetic
ARGVNPDDILTGVDAFDI

SEQ ID NO: 6923 - protein, 107 aa, Artificial Sequence
  Synthetic
DIQMTQSPSTLSASVGDRVTITCRASQSMSSWLAWYQQKPGNAPKLLIYKASSLESGVPSRFSGSGSGTEFTLTISSLQPDDFATYYCQQHNSSPLTFGGGTKVEIK

SEQ ID NO: 6924 - protein, 9 aa, Artificial Sequence
  Synthetic
QQHNSSPLT

SEQ ID NO: 6925 - protein, 132 aa, Artificial Sequence
  Synthetic
QVQLVQSGAEVVRPGASVKVSCKASGYTFTTHYMHWVRQAPGQGLEWMGIINPSVGSTSYAQKFQGRVTMTRDTSTSTVYMELSSLISEDTAMYYCARGPRSPSDWCSGGSCYDDQNWFDPWGQGTLVTVSS

SEQ ID NO: 6926 - protein, 25 aa, Artificial Sequence
  Synthetic
ARGPRSPSDWCSGGSCYDDQNWFDP

SEQ ID NO: 6927 - protein, 107 aa, Artificial Sequence
  Synthetic
DIQMTQSPSSLSASVGDRVTITCRASQSISSYLNWYQQKPGKAPKLLIYSASSLQSGVPSRFSGSGSGTDFTLTISSLQPEDFATYYCQQSYSTLITFGQGTRLEIK

SEQ ID NO: 6928 - protein, 9 aa, Artificial Sequence
  Synthetic
QQSYSTLIT

SEQ ID NO: 6929 - protein, 124 aa, Artificial Sequence
  Synthetic
QVQLVQSGAEVMKPGASVKVSCKASGYTFTSYYMHWVRQAPGQGLEWMGIINPTAGSTSYAQKFQGRVTMTRDTSTSTVYMELSSLRSEDTAVYYCARDFELWFGELRGWFDPWGQGTLVTVSS

SEQ ID NO: 6930 - protein, 17 aa, Artificial Sequence
  Synthetic
ARDFELWFGELRGWFDP

SEQ ID NO: 6931 - protein, 108 aa, Artificial Sequence
  Synthetic
EIVMTQSPATLSVSPGERATLSCRASQSVSSNLAWYQQKPGQAPTLLIYGASTRATGIPARFSGSGSGTEFTLTISSLQSEDFAVYYCQQYNNWPPITFGQGTRLEIK

SEQ ID NO: 6932 - protein, 10 aa, Artificial Sequence
  Synthetic
QQYNNWPPIT

SEQ ID NO: 6933 - protein, 125 aa, Artificial Sequence
  Synthetic
EVQLVESGGGLVQPGGSLRLSCAASGFTFSGYSMNWVRQAPGKGPEWVSYISRSSSTIYYADSVKGRFTISRDNAKNSLYLQMNSLRDEDTAVYYCAREGARVGATYDTYYFDYWGQGTLVTVSS

SEQ ID NO: 6934 - protein, 18 aa, Artificial Sequence
  Synthetic
AREGARVGATYDTYYFDY

SEQ ID NO: 6935 - protein, 109 aa, Artificial Sequence
  Synthetic
EIVLTQSPATLSLSPGERATLSCRASQSFSSYLAWYQQKPGQAPRLLIYDASNRATGIPARFSGSGSGTDFTLTISSLEPEDFAVYYCQQRNNWPPEWTFGQGTKVEIK

SEQ ID NO: 6936 - protein, 11 aa, Artificial Sequence
  Synthetic
QQRNNWPPEWT

SEQ ID NO: 6937 - protein, 124 aa, Artificial Sequence
  Synthetic
EVQLVESGGGLIQPGGSLRLSCAASGFTVSSNYMSWVRQAPGKGLEWVSLIYSGGSTYYADSVKGRFTISRDNSKNTLYLQMNSLRAEDTAVYYCARTDIVVVPAARGFYFDYWGQGTLVTVSS

SEQ ID NO: 6938 - protein, 18 aa, Artificial Sequence
  Synthetic
ARTDIVVVPAARGFYFDY

SEQ ID NO: 6939 - protein, 106 aa, Artificial Sequence
  Synthetic
DIQMTQSPSTLSASVGDRVTITCRASQSISSWLAWYQQKPGKAPKLLIYKASSLESGVPSRFSGSGSGTEFTLTISSLQPDDFATYYCQQYNSYGTFGQGTKVEIK

SEQ ID NO: 6940 - protein, 8 aa, Artificial Sequence
  Synthetic
QQYNSYGT

SEQ ID NO: 6941 - protein, 117 aa, Artificial Sequence
  Synthetic
EVQLVESGGGLIQPGGSLRLSCAASGFIVSSNYMSWVRQAPGKGLEWVSVIYSGGSTYYADSVKGRFTISRDNSKNTLYLQMNSLRVEDTAVYYCARDYGDYYFDYWGQGTLVTVSS

SEQ ID NO: 6942 - protein, 11 aa, Artificial Sequence
  Synthetic
ARDYGDYYFDY

SEQ ID NO: 6943 - protein, 108 aa, Artificial Sequence
  Synthetic
EIVLTQSPGTLSLSPGERATLSCRASQSVSSSYLAWYQQKPGQAPRLLIYGAFSRATGIPDRFSGSGSGTDFTLTISRLEPEDFAVYYCQQYGSSPRTFGQGTKVEIK

SEQ ID NO: 6944 - protein, 9 aa, Artificial Sequence
  Synthetic
QQYGSSPRT

SEQ ID NO: 6945 - protein, 120 aa, Artificial Sequence
  Synthetic
EVQLVQSGAEVKKPGESLKISCKGSGYSFTSYWIGWVRQMPGKDLEWMGIIYPGDSDTRYSPSFQGQVTISADKSISTAYLQWSSLKASDTAMYYCALTTVTTGRWFDPWGQGTLVTVSS

SEQ ID NO: 6946 - protein, 13 aa, Artificial Sequence
  Synthetic
ALTTVTTGRWFDP

SEQ ID NO: 6947 - protein, 112 aa, Artificial Sequence
  Synthetic
DVVMTQSPLSLPVTLGQPASISCRSSQSLVYSDGNTYLNWFQQRPGQSPRRLIYQVSNRDSGVPDRFSGSGSGTDFTLKISRVEAEDVGVYYCMQGTHWLWTFGQGTKVEIK

SEQ ID NO: 6948 - protein, 9 aa, Artificial Sequence
  Synthetic
MQGTHWLWT

SEQ ID NO: 6949 - protein, 125 aa, Artificial Sequence; identical to SEQ ID NO: 6921
  Synthetic

SEQ ID NO: 6950 - protein, 18 aa, Artificial Sequence
  Synthetic
ARGVNPDDILTGVDAFDI

SEQ ID NO: 6951 - protein, 107 aa, Artificial Sequence; identical to SEQ ID NO: 6923
  Synthetic

SEQ ID NO: 6952 - protein, 9 aa, Artificial Sequence
  Synthetic
QQHNSSPLT

SEQ ID NO: 6953 - protein, 123 aa, Artificial Sequence
  Synthetic
EVQLVQSGAEVKKPGESLRISCKGSGYSFTSYYISWVRQMPGKGLEWMGRIDPSDSYTNYSPSFQGHVTISADKSISAAYLQWSSLKASDTAMYYCARHRHPGITMIVALDYWGQGTLVTVSS

SEQ ID NO: 6954 - protein, 16 aa, Artificial Sequence
  Synthetic
ARHRHPGITMIVALDY

SEQ ID NO: 6955 - protein, 105 aa, Artificial Sequence
  Synthetic
DIQMTQSPSSLSASVGDRVTITCQASQDISNYLNWYQQKPGKAPKLLIYDASYLETGVPSRFTGSASGTDFTFTISSLQPEDIATYYCQQYDNVPLFGPGTKVDI

SEQ ID NO: 6956 - protein, 8 aa, Artificial Sequence
  Synthetic
QQYDNVPL

SEQ ID NO: 6957 - protein, 117 aa, Artificial Sequence
  Synthetic
EVQLVESGGGLIQPGGSLRLSCAASGFTVSSNYMSWVRQAPGKGLEWVSVIYSGGSTFYADSVKGRFTISRDNSKNTLYLQMNSLRAEDTAVYYCARDWGEYYFDYWGQGTLVTVSS

SEQ ID NO: 6958 - protein, 11 aa, Artificial Sequence
  Synthetic
ARDWGEYYFDY

SEQ ID NO: 6959 - protein, 107 aa, Artificial Sequence
  Synthetic
EIVLTQSPGTLSLSPGERATLSCRASQSVTSYLAWYQQKPGQAPRLLIYGASSRATGIPDRFSGSGSGTDFTLTISRLDPEDFAVYYCQQYGSSPRTFGQGTKVEIK

SEQ ID NO: 6960 - protein, 9 aa, Artificial Sequence
  Synthetic
QQYGSSPRT

SEQ ID NO: 6961 - protein, 123 aa, Artificial Sequence
  Synthetic
QVQLQQWGAGLLKPSETLSLSCAVYGGSLSGYYWSWIRQPPGKGLEWIGEINHFGSTGYNPSLKSRVTISVDTSKSQFSVKLSSVTAADTAVYYCARKPLLYSNLSPGAFDIWGQGTMVTVSS

SEQ ID NO: 6962 - protein, 17 aa, Artificial Sequence
  Synthetic
ARKPLLYSNLSPGAFDI

SEQ ID NO: 6963 - protein, 108 aa, Artificial Sequence
  Synthetic
EIVLTQSPGTLSLSPGERATLSCWASQSVSASYLAWYQQKPGQAPRLLIYGASSRATGIPDRFSGSGSGTDFTLTISRLEPEDFAVYYCQQYGTTPRTFGGGTKVEIK

SEQ ID NO: 6964 - protein, 9 aa, Artificial Sequence
  Synthetic
QQYGTTPRT

SEQ ID NO: 6965 - protein, 123 aa, Artificial Sequence
  Synthetic
QVQLVESGGGVVQPGRSLRLSCAASGFTFSSYGMHWVRQAPGKGLEWVAVISYDGSNKYYADSVKGRFTISRDNSKNTLYLQMNSLRAEDTAVYYCAKAGYSYGYPQQYFDYWGQGTLVTVSS

SEQ ID NO: 6966 - protein, 16 aa, Artificial Sequence
  Synthetic
AKAGYSYGYPQQYFDY

SEQ ID NO: 6967 - protein, 107 aa, Artificial Sequence
  Synthetic
DIQMTQSPSTLSASVGDRVTITCRASQSISSWLAWYQQKPGKAPKLLISEASSLESGVPSRFSGSGSGTEFTLTISSLQPDDFATYYCQQYNSYSYTFGQGTKLEIK

SEQ ID NO: 6968 - protein, 9 aa, Artificial Sequence
  Synthetic
QQYNSYSYT

SEQ ID NO: 6969 - protein, 118 aa, Artificial Sequence
  Synthetic
EVQLVESGGGLIQPGGSLRLSCAASGFTVSSNYMSWVRQAPGKGLEWVSVIYSGGSTFYADSVKGRFTISSDNSKNTLYLQMNSLRAEDTAVYYCARDLRGPGTFDIWGQGTMVTVSS

SEQ ID NO: 6970 - protein, 12 aa, Artificial Sequence
  Synthetic
ARDLRGPGTFDI

SEQ ID NO: 6971 - protein, 108 aa, Artificial Sequence
  Synthetic
DIQMTQSPSSLSASVGDRVTITCQASQDISNYLNWYQQKPGKAPKLLIYDASNLETGVPSRFSGSGSGTDFTFTISSLQPEDIATYYCQQYDNLPRVTFGPGTKVDIK

SEQ ID NO: 6972 - protein, 10 aa, Artificial Sequence
  Synthetic
QQYDNLPRVT

SEQ ID NO: 6973 - protein, 118 aa, Artificial Sequence
  Synthetic
EVQLVQSGAEVKKPGESLRISCKGSAYIFTTYWISWVRQMPGKGLEWMGRIDPSDSYTNYSPSFQGHVTISADKSISTAYLQWSSLKASDTAMYYCARHISSGWYDYWGQGTLVTVSS

SEQ ID NO: 6974 - protein, 11 aa, Artificial Sequence
  Synthetic
ARHISSGWYDY

SEQ ID NO: 6975 - protein, 106 aa, Artificial Sequence
  Synthetic
DIQMTQSPSSLSASVGDRVTITCQASQDISNYLNWYQQKPGKAPKLLIYDASNLETGVPSRFSGSKSGTDFTFTISSLQPEDIATYYCQQYDNLPYTFGQGTKVEI

SEQ ID NO: 6976 - protein, 9 aa, Artificial Sequence
  Synthetic
QQYDNLPYT

SEQ ID NO: 6977 - protein, 123 aa, Artificial Sequence
  Synthetic
QMQLVQSGPEVKKPGTSVKVSCKASGFTFTSSAVQWVRQARGQRLEWIGWIVVGSGNTNYVQKFQERVTITRDMSTSTAYMELSSLRSEDTAVYYCAAPHCSSTSCFDAFDIWGQGTMVTVSS

SEQ ID NO: 6978 - protein, 16 aa, Artificial Sequence
  Synthetic
AAPHCSSTSCFDAFDI

SEQ ID NO: 6979 - protein, 108 aa, Artificial Sequence
  Synthetic
EIVLTQSPGTLSLSPGERATLSCRASQSVSSSYLAWYQQKPGQAPRLLIYGASSRATGIPDRFSGSGSGTDFTLTISRLEPEDFAVYYCQQYGNSPWTFGQGTKVEIK

SEQ ID NO: 6980 - protein, 9 aa, Artificial Sequence
  Synthetic
QQYGNSPWT

SEQ ID NO: 6981 - protein, 117 aa, Artificial Sequence
  Synthetic
EVQLVESGGGLIQPGGSLRLSCAASGFIVSSNYMSWVRQAPGKGLEWVSIIYSGGSTFYADSVKGRFTISRDNSKNTLYLQMNSLRAEDTAVYYCARTMDGDYFDYWGQGTLVTVSS

SEQ ID NO: 6982 - protein, 11 aa, Artificial Sequence
  Synthetic
ARTMDGDYFDY

SEQ ID NO: 6983 - protein, 107 aa, Artificial Sequence
  Synthetic
DIQMTQSPSSLSASVGDRVTITCRASQDINNYLAWYQQKPGKVPKLLIYAASTLQSGVPSRFSGSGSGTDFTLTISSLQPEDVATFYCQKYNSAPLTFGGGTKVEIK

SEQ ID NO: 6984 - protein, 9 aa, Artificial Sequence
  Synthetic
QKYNSAPLT

SEQ ID NO: 6985 - protein, 123 aa, Artificial Sequence
  Synthetic
QVQLVESGGGVVQPGRSLRLSCAASGFTFSSYAIHWVRQAPGKGLEWVAVISYDGSNKYYADSVKGRFTISRDNSKNTLYLQMNSLRADDTAVYYCARDSPSQIVVVPVFDYWGQGTLVTVSS

SEQ ID NO: 6986 - protein, 16 aa, Artificial Sequence
  Synthetic
ARDSPSQIVVVPVFDY

SEQ ID NO: 6987 - protein, 108 aa, Artificial Sequence
  Synthetic
DIQMTQSPSSLSASVGDRVTITCRASQSISRYLNWYQQKPGKAPNLLIYAASSLQSGVPSRFSGSGSGTDFTLIISSLQPEDFATYYCQQSYSTLALTFGGGTKVEIK

SEQ ID NO: 6988 - protein, 10 aa, Artificial Sequence
  Synthetic
QQSYSTLALT

SEQ ID NO: 6989 - protein, 123 aa, Artificial Sequence
  Synthetic
EVQLVESGGGLVQPGRSLRLSCAASGFTFDDYAMHWVRQAPGKGLEWVSGVSWNSGSIGYADSVRGRFTISRDNAKNSLYLQMNSLRAEDTALYYCAKALSSTGFLVVYFDYWGRGTLVTVSS

SEQ ID NO: 6990 - protein, 16 aa, Artificial Sequence
  Synthetic
AKALSSTGFLVVYFDY

SEQ ID NO: 6991 - protein, 108 aa, Artificial Sequence
  Synthetic
EIVMTQSPATLSVSPGERATLSCRASQSVSSNLAWYQQKPGQAPRLLIYGASTRATGIPARFSGSGSGTEFTLTISSLQSEDFAVYYCQQYNNWLSLTFGGGTKVEIK

SEQ ID NO: 6992 - protein, 10 aa, Artificial Sequence
  Synthetic
QQYNNWLSLT

SEQ ID NO: 6993 - protein, 128 aa, Artificial Sequence
  Synthetic
EVQLVQSGAEVKKPGESLKISCKGSGYRFTSYWIGWVRQMPGKGLEWMGIIYPGDSDATYSPSFQGQVTISADRSISTAYLQWSSLKASDTAMYYCARSFRDDPRIAVAGPADAFDIWGQGTMVTVSS

SEQ ID NO: 6994 - protein, 21 aa, Artificial Sequence
  Synthetic
ARSFRDDPRIAVAGPADAFDI

SEQ ID NO: 6995 - protein, 107 aa, Artificial Sequence
  Synthetic
DIQMTQSPSTLSASVGDRATITCRASQSISYWLAWYQQKPGKAPKLLIYKASSLESGVPSRFSGSGSGTEFTLTISSLQPDDSATYYCQQYNSYPYTFGQGTKLEIK

SEQ ID NO: 6996 - protein, 9 aa, Artificial Sequence
  Synthetic
QQYNSYPYT

SEQ ID NO: 6997 - protein, 126 aa, Artificial Sequence
  Synthetic
QVQLVQSGAEVKKSGSSVKVSCKASGGTFSSYGISWVRQAPGQGLEWMGGIIPIIGTANYAQKFQGRVTITADESMSTAYMELSSLRSEDTAVYYCARAGLLTKNIVATIGCFDPWGQGTLVTVSS

SEQ ID NO: 6998 - protein, 19 aa, Artificial Sequence
  Synthetic
ARAGLLTKNIVATIGCFDP

SEQ ID NO: 6999 - protein, 113 aa, Artificial Sequence; identical to SEQ ID NO: 2359
  Synthetic
  misc_feature (15)..(15): Xaa can be any naturally occurring amino acid

SEQ ID NO: 7000 - protein, 9 aa, Artificial Sequence
  Synthetic
QQYYSTPLT

SEQ ID NO: 7001 - protein, 129 aa, Artificial Sequence
  Synthetic
QVQLVQSGAEVKKPGASVKVSCKASGYTFTSYGITWVRQAPGQGLQWMGWISAYNGNTNYAQKLQGRVTMTTDTSTSTAYMELRSLRSDDTAVYYCARVGHARGVITGGDYFYYGMDVWGQGTTVTVSS

SEQ ID NO: 7002 - protein, 22 aa, Artificial Sequence
  Synthetic
ARVGHARGVITGGDYFYYGMDV

SEQ ID NO: 7003 - protein, 107 aa, Artificial Sequence
  Synthetic
EIVLTQSPGTLSLSPGERATLSCRASQSVSSSYLAWYQQKPGQAPRLLIYGTSSRATGIPDRFSGSGSGTDFTLTISRLEPEDFAVYYCQQYGSSPTFGGGTKVEIK

SEQ ID NO: 7004 - protein, 8 aa, Artificial Sequence
  Synthetic
QQYGSSPT

SEQ ID NO: 7005 - protein, 127 aa, Artificial Sequence
  Synthetic
EVQLLESGGGLVQPGGSLRLSCAASGITFSSYAMTWVRQAPGKGLEWVSTISGSGGGTYYADSVKGRFTISRDNSKNTLYLQMNSLRAEDTAVYYCVETNLWFGEDNYYYYYGMDVWGQGTTVTVSS

SEQ ID NO: 7006 - protein, 20 aa, Artificial Sequence
  Synthetic
VETNLWFGEDNYYYYYGMDV

SEQ ID NO: 7007 - protein, 109 aa, Artificial Sequence
  Synthetic
EIVLTQSPGTLSLSPGERATLSCRASQSVRSSYLAWYQQKPGQAPRLLIYGASSRATGIPDRFSGSGSGTDFTLTISRLEPEDFAVYYCQQYGSSPPWTFGQGTKVEIK

SEQ ID NO: 7008 - protein, 10 aa, Artificial Sequence
  Synthetic
QQYGSSPPWT

SEQ ID NO: 7009 - protein, 117 aa, Artificial Sequence
  Synthetic
EVQLVESGGGLIQPGGSLRLSCAASGFIVSSNYMSWVRQAPGKGLEWVSVIYSGGSTYYADSVKGRFTISRDNSKNTLYLQMNSLRAEDTAVYYCARDYGDFYFDYWGQGTLVTVSS

SEQ ID NO: 7010 - protein, 11 aa, Artificial Sequence
  Synthetic
ARDYGDFYFDY

SEQ ID NO: 7011 - protein, 107 aa, Artificial Sequence
  Synthetic
EIVMTQSPATLSVSPGERATLSCRASQSVSSNLAWYQQKPGQAPRLLIYGASTRATGIPARFSGSGSGTEFTLTISSLQSEDFAVYYCQQYYNWPRTFGQGTKVEIK

SEQ ID NO: 7012 - protein, 9 aa, Artificial Sequence
  Synthetic
QQYYNWPRT

SEQ ID NO: 7013 - protein, 123 aa, Artificial Sequence
  Synthetic
QVQLQQWGAGLLKPSETLSLTCAVSGGSLSGFYWTWIRQPPGKGLEWIGETNHFGSTDYKPSLKSRVTISVDMSRNQFSLIMTSVTAADTAVYYCARKTLLFSDFSPGAFDIWGQGTMVVVSS

SEQ ID NO: 7014 - protein, 17 aa, Artificial Sequence
  Synthetic
ARKTLLFSDFSPGAFDI

SEQ ID NO: 7015 - protein, 107 aa, Artificial Sequence
  Synthetic
EIVLTQSPGTLSLSPGERATLSCRASQTLTANYLAWYQQKPGQAPRLLIYGASKRATGIPDRFSGSGSGTDFTLSISRLEPEDFAVYYCQQYGTTPRTFGGGTKVEI

SEQ ID NO: 7016 - protein, 9 aa, Artificial Sequence
  Synthetic
QQYGTTPRT

SEQ ID NO: 7017 - protein, 116 aa, Artificial Sequence
  Synthetic
EVQLVESGGGLIQPGGSLRLSCAASGFTVSSNYMSWVRQAPGKGLEWVSVIYSGGSTYYADSVKGRFTISRDNSKNTLYLQMNSLRADDTAVYYCATDLTSGRGPWGQGTLVTVSS

SEQ ID NO: 7018 - protein, 10 aa, Artificial Sequence
  Synthetic
ATDLTSGRGP

SEQ ID NO: 7019 - protein, 107 aa, Artificial Sequence
  Synthetic
AIQMTQSPSSLSASVGDRVTITCRASQGIRNDLGWYQQKPGKAPKLLIYAASSLQSGVPSRFSGSGSGTDFTLTISSLQPEDFATYYCLQDYNYPKTFGQGTKVEIK

SEQ ID NO: 7020 - protein, 9 aa, Artificial Sequence
  Synthetic
LQDYNYPKT

SEQ ID NO: 7021 - protein, 115 aa, Artificial Sequence
  Synthetic
EVQLVESGGGLIQPGGSLRLSCAASGLTVSSNYMSWVRQAPGKGLEWVSVIYSGGSTFYADSVKGRFTISRDNSKNTLYLQMNSLRAEDTAVYYCAREVAAFDIWGQGTMVTVSS

SEQ ID NO: 7022 - protein, 9 aa, Artificial Sequence
  Synthetic
AREVAAFDI

SEQ ID NO: 7023 - protein, 107 aa, Artificial Sequence
  Synthetic
DIQLTQSPSFLSASVGDRVTITCRASQGISSYLAWYQQKPGKAPKLLIYAASTLQSGVPSRFSGSGSGTEFTLTISSLQPEDFATYYCQQLNSYPPGFGQGTKVEIK

SEQ ID NO: 7024 - protein, 9 aa, Artificial Sequence
  Synthetic
QQLNSYPPG

SEQ ID NO: 7025 - protein, 130 aa, Artificial Sequence
  Synthetic
  misc_feature (76)..(76): Xaa can be any naturally occurring amino acid
QVQLQESGPGLVKPSQTLSLTCTVSGGSISSGGYYWSWIRQHPGKGLEWIGYIYYSGSTYYNPSLKSRVTISVDTXKNQFSLKLSSVTAADTAVYYCAWRYSSSWYTVDNKKGDYYFDYWGQGTLVTVSS

SEQ ID NO: 7026 - protein, 22 aa, Artificial Sequence
  Synthetic
AWRYSSSWYTVDNKKGDYYFDY

SEQ ID NO: 7027 - protein, 112 aa, Artificial Sequence
  Synthetic
DIVMTQSPLSLPVTPGEPASISCRSSESLLHSNGYNYLDWYLQKPGQSPQLLIYLGSNRASGVPDRFSGSGSGTDFTLKISRVEAEDVGVYYCMQALQTPRTFGQGTKLEIK

SEQ ID NO: 7028 - protein, 9 aa, Artificial Sequence
  Synthetic
MQALQTPRT

SEQ ID NO: 7029 - protein, 127 aa, Artificial Sequence
  Synthetic
QVQLVQSGAEVKKPGASVKVSCKASGYTFTSYDINWVRQATGQGLEWMGWMNPNSGNTGYAQKFQGRVTMTRNTSISTAYMELSSLRSEDTAVYYCARGGRYCSSTSCYSHVGFDPWGQGTLVTVSS

SEQ ID NO: 7030 - protein, 20 aa, Artificial Sequence
  Synthetic
ARGGRYCSSTSCYSHVGFDP

SEQ ID NO: 7031 - protein, 107 aa, Artificial Sequence
  Synthetic
DIQLTQSPSFLSASVGDRVTITCRASQGISSYLAWFQQKPGKAPKLLIYAASTLQTGVPSRFSGSGSGTEFTLTISSLQPEDFATYYCQQLNSYPITFGQGTRLEIK

SEQ ID NO: 7032 - protein, 9 aa, Artificial Sequence
  Synthetic
QQLNSYPIT

SEQ ID NO: 7033 - protein, 117 aa, Artificial Sequence; identical to SEQ ID NO: 6957
  Synthetic

SEQ ID NO: 7034 - protein, 11 aa, Artificial Sequence
  Synthetic
ARDWGEYYFDY

SEQ ID NO: 7035 - protein, 107 aa, Artificial Sequence; identical to SEQ ID NO: 6959
  Synthetic

SEQ ID NO: 7036 - protein, 9 aa, Artificial Sequence
  Synthetic
QQYGSSPRT

SEQ ID NO: 7037 - protein, 129 aa, Artificial Sequence
  Synthetic
EVQLVESGGGLVQPGGSLRLSCAASGFTFSSYSMNWVRQAPGKGLEWVSYISTSSSTIYYADSVQGRFTISRDNAKNSLYLQMNSLRDEDTAVYYCARDQGYCSSTSCYDGYYYYMDVWGKGTTVTVSS

SEQ ID NO: 7038 - protein, 22 aa, Artificial Sequence
  Synthetic
ARDQGYCSSTSCYDGYYYYMDV

SEQ ID NO: 7039 - protein, 107 aa, Artificial Sequence
  Synthetic
DIQMTQSPSSLSASVGDRVTITCRASQSISSYLNWYQQKPGKAPKLLIYAASSLHSGVPSRFSGSGSGTDFTLTISSLQPEDFATYYCQQSYSAPWTFGQGTKVEIK

SEQ ID NO: 7040 - protein, 9 aa, Artificial Sequence
  Synthetic
QQSYSAPWT

SEQ ID NO: 7041 - protein, 117 aa, Artificial Sequence
  Synthetic
EVQLVESGGGLIQPGGSLRLSCAASGFIVSSNYMSWVRQAPGKGLEWVSVIYSGGSTFYADSVKGRFTISRDNSKNTLYLQMNSLRAEDTAVYYCARDYGDYYFDYWGQGTLVTVSS

SEQ ID NO: 7042 - protein, 11 aa, Artificial Sequence
  Synthetic
ARDYGDYYFDY

SEQ ID NO: 7043 - protein, 108 aa, Artificial Sequence; identical to SEQ ID NO: 1031
  Synthetic

SEQ ID NO: 7044 - protein, 9 aa, Artificial Sequence
  Synthetic
QQYGSSPRT

SEQ ID NO: 7045 - protein, 120 aa, Artificial Sequence; identical to SEQ ID NO: 6785
  Synthetic

SEQ ID NO: 7046 - protein, 11 aa, Artificial Sequence
  Synthetic
TRWDGWSQHDY

SEQ ID NO: 7047 - protein, 111 aa, Artificial Sequence
  Synthetic
DIVMTQSPLSLSVTPGEPASISCRSSQSLLHSNGNNYFDWYLQKPGQSPQLLIYLGSNRASGVPDRFSGSGSGTDFTLKISRVEAEDVGVYYCMQVLQIPYTFGQGTKLEI

SEQ ID NO: 7048 - protein, 9 aa, Artificial Sequence
  Synthetic
MQVLQIPYT

SEQ ID NO: 7049 - protein, 122 aa, Artificial Sequence
  Synthetic
QVQLVQSGAEVKKPGSSVKVSCKASGGTFSIYAISWVRQAPGQGLEWMGGIIPILGTANYAQKFQGRVTITADESTSTAYMELSSLRSEDTAVYYCASFHVAYGDYIPFDYWGQGTLVTVSS

SEQ ID NO: 7050 - protein, 15 aa, Artificial Sequence
  Synthetic
ASFHVAYGDYIPFDY

SEQ ID NO: 7051 - protein, 109 aa, Artificial Sequence
  Synthetic
EIVLTQSPGTLSLSPGERATLSCRASQSVSSSYLAWYQQKPGQAPRLLIYGASSRATGIPDRFSGSGSGTDFTLTISRLEREDFAVYYCQQYGRSPTWTFGQGTKVEIK

SEQ ID NO: 7052 - protein, 10 aa, Artificial Sequence
  Synthetic
QQYGRSPTWT

SEQ ID NO: 7053 - protein, 128 aa, Artificial Sequence
  Synthetic
QVQLVQSGAEVKKPGASVKVSCKASGYTFTGYYMHWVRQAPGQGLEWMGWINPNSGGTNYAQKFQGRVTMTRDTSISTAYMELSRLRSDDTAVYYCAREPQINPYYDILTGYRAFDYWGQGTLVTVSS

SEQ ID NO: 7054 - protein, 21 aa, Artificial Sequence
  Synthetic
AREPQINPYYDILTGYRAFDY

SEQ ID NO: 7055 - protein, 107 aa, Artificial Sequence
  Synthetic
EIVLTQSPGTLSLSPGERATLSCRASQSVSSSYLAWYQQKPGQAPRLLIYGASSRATGIPDRFSGSGSGTDFTLTISRLEPEDFAVYYCQQYGSSLTFGQGTRLEIK

SEQ ID NO: 7056 - protein, 8 aa, Artificial Sequence
  Synthetic
QQYGSSLT

SEQ ID NO: 7057 - protein, 117 aa, Artificial Sequence; identical to SEQ ID NO: 339
  Synthetic

SEQ ID NO: 7058 - protein, 11 aa, Artificial Sequence
  Synthetic
ARDLGTGLFDY

SEQ ID NO: 7059 - protein, 108 aa, Artificial Sequence; identical to SEQ ID NO: 340
  Synthetic

SEQ ID NO: 7060 - protein, 10 aa, Artificial Sequence
  Synthetic
QQLDSYPPGT

SEQ ID NO: 7061 - protein, 123 aa, Artificial Sequence
  Synthetic
QVQLQQWGAGLLKPSETLSLTCAVSGGSLSGFYWTWIRQPPGKGLEWIGETNHFGSTDYKPSLKSRVTISVDMSRNQFSLKVTSVTAADTAVYYCARKPLLHSDLSPGAFDIWGQGTMVAVSS

SEQ ID NO: 7062 - protein, 17 aa, Artificial Sequence
  Synthetic
ARKPLLHSDLSPGAFDI

SEQ ID NO: 7063 - protein, 107 aa, Artificial Sequence
  Synthetic
EIVLTQSPGTLSLSPGERATLSCRASQTVSANYLAWYQQKAGQAPRLLIYGASKRATGIPDRFSGSGSGTDFTLSISRLEPEDFAVYYCQQYVTTPRTFGGGTKVEI

SEQ ID NO: 7064 - protein, 9 aa, Artificial Sequence
  Synthetic
QQYVTTPRT

SEQ ID NO: 7065 - protein, 118 aa, Artificial Sequence
  Synthetic
EVQLVESGGGLIQPGGSLRLSCAASGFTVSSNYMTWVRQAPGKGLEWVSLIYPGGSTYYADSVKGRFTISRDNSKNTLYLQMNSLRAEDTAVYYCAREGMGMAAAGTWGQGTLVTVSS

SEQ ID NO: 7066 - protein, 12 aa, Artificial Sequence
  Synthetic
AREGMGMAAAGT

SEQ ID NO: 7067 - protein, 107 aa, Artificial Sequence
  Synthetic
DIQMTQSPSSLSASVGDTVTITCQASQDISKYLNWYQQKPGKAPKLLIYDASNLETGVPSRFSGSGSGTDFTFTISSLQPEDIATYYCQQYDNLPQTFGGGTKVEIK

SEQ ID NO: 7068 - protein, 9 aa, Artificial Sequence
  Synthetic
QQYDNLPQT

SEQ ID NO: 7069 - protein, 122 aa, Artificial Sequence; identical to SEQ ID NO: 299
  Synthetic

SEQ ID NO: 7070 - protein, 16 aa, Artificial Sequence
  Synthetic
ARVRYDSSGYFWSLDY

SEQ ID NO: 7071 - protein, 108 aa, Artificial Sequence; identical to SEQ ID NO: 300
  Synthetic

SEQ ID NO: 7072 - protein, 10 aa, Artificial Sequence
  Synthetic
QQSYSTPQYT

SEQ ID NO: 7073 - protein, 127 aa, Artificial Sequence
  Synthetic
QVQLVESGGGVVQPGRSLRLSCAASGFTFSSYGMHWVRQAPGKGLEWVAVILYDGSNKYYADSVKGRFTISRDNSKNTLYLQMNSLRAEDTAVYYCAKSLGPYCSGGNCYSSYFDYWGQGTLVTVSS

SEQ ID NO: 7074 - protein, 20 aa, Artificial Sequence
  Synthetic
AKSLGPYCSGGNCYSSYFDY

SEQ ID NO: 7075 - protein, 106 aa, Artificial Sequence
  Synthetic
DIQMTQSPSTLSASVGDRVTITCRASQSISSWLAWYQQKPGKAPKLLIYEASSLESGVPSRFSGSGSGTEFTLTISSLQPDDFATYYCQQYNSYSTFGPGTKVDIK

SEQ ID NO: 7076 - protein, 8 aa, Artificial Sequence
  Synthetic
QQYNSYST

SEQ ID NO: 7077 - protein, 127 aa, Artificial Sequence
  Synthetic
QVQLVESGGGVVQPGRSLRLSCAASGFTFSSYGMHWVRQAPGKGLEWVAVISYDGSNKYYGDSVKGRFTISRDNSKNTLYLQMNSLRAEDTAVYYCAKKGGGAYCGGDCYLGEFDYWGQGTLVTVSS

SEQ ID NO: 7078 - protein, 20 aa, Artificial Sequence
  Synthetic
AKKGGGAYCGGDCYLGEFDY

SEQ ID NO: 7079 - protein, 108 aa, Artificial Sequence
  Synthetic
EIVLTQSPGTLSLSPGERATLSCRASQSVSSSYLAWYQQKPGQAPRLLIYGASSRATGIPDRFSGSGSGTDFTLTISRLEPEDFAVFYCQQYGTSPSTFGQGTKVESK

SEQ ID NO: 7080 - protein, 9 aa, Artificial Sequence
  Synthetic
QQYGTSPST

SEQ ID NO: 7081 - protein, 124 aa, Artificial Sequence
  Synthetic
EVQLVESGGGLVQPGRSLRLSCAASGFTFDDYAIHWVRQAPEKGLEWVSGINWSSGSIVYADSVKGRFTISRDNAKNSLYLQMNSLRAEDTALYYCAKGLIAELVGGGWYFDYWGQGTLVTVSS

SEQ ID NO: 7082 - protein, 17 aa, Artificial Sequence
  Synthetic
AKGLIAELVGGGWYFDY

SEQ ID NO: 7083 - protein, 108 aa, Artificial Sequence
  Synthetic
EIVLTQSPATLSLSPGERATLSCRASQSVSSYLAWYQQKPGQAPRLLIYDASNRATGIPARFSGGGSGTDFTLTISSLEPEDFAVYYCQQRSNWPPLTFGQGTKVEIK

SEQ ID NO: 7084 - protein, 10 aa, Artificial Sequence
  Synthetic
QQRSNWPPLT

SEQ ID NO: 7085 - protein, 127 aa, Artificial Sequence
  Synthetic
QVQLVESGGGVVQPGRSLRLSCAASGFTFSSYGMHWVRQAPGKGLEWVAVISYDGSNKYYADSVKGRFTISRDNSKNTLYLQMNSLRAEDTAVYYCAKQAGPYCSGGTCYPGTLDYWGQGTLVTVSS

SEQ ID NO: 7086 - protein, 20 aa, Artificial Sequence
  Synthetic
AKQAGPYCSGGTCYPGTLDY

SEQ ID NO: 7087 - protein, 107 aa, Artificial Sequence
  Synthetic
DIQMTQSPSSLSASVGDRVTITCQASQDISNYLNWYQQKPGKAPKLLIYDASNLETGVPSRFSGSGSGTDFTFTISSLQPEDIATYYCQQYDNVPLTFGPGTKVDIK

SEQ ID NO: 7088 - protein, 9 aa, Artificial Sequence
  Synthetic
QQYDNVPLT

SEQ ID NO: 7089 - protein, 123 aa, Artificial Sequence
  Synthetic
QVQLQQWGAGLLKPSETLSLTCAVSGGSLSGFYWTWIRQPPGKGLEWIGETNHFGSTGYKPSLKSRVTISVDMSRNQFSLKVTSVTAADTAVYYCARKPLLYSDFSPGAFDIWGQGTMVAVSS

SEQ ID NO: 7090 - protein, 17 aa, Artificial Sequence
  Synthetic
ARKPLLYSDFSPGAFDI

SEQ ID NO: 7091 - protein, 107 aa, Artificial Sequence
  Synthetic
EIVLTQSPGTLSLSPGERATLSCRASQTVTANYLAWYQQKPGQAPRLLIYGASKRATGIPDRFSGSGSGTDFTLSISRLEPEDFAVYYCQQYTTTPRTFGGGTKVEI

SEQ ID NO: 7092 - protein, 9 aa, Artificial Sequence
  Synthetic
QQYTTTPRT

SEQ ID NO: 7093 - protein, 128 aa, Artificial Sequence
  Synthetic
EVQLVESGGGLVQPGGSLRLSCAASGFTFSSYDMHWVRQATGKGLEWVSTIGTAGDTYYPGSVKGRFTISRENAKNSLYLQMNSLRAGDTAVYFCARGVSGVVRGVIRSFYYYGLDVWGQGTTVTVSS

SEQ ID NO: 7094 - protein, 22 aa, Artificial Sequence
  Synthetic
ARGVSGVVRGVIRSFYYYGLDV

SEQ ID NO: 7095 - protein, 108 aa, Artificial Sequence
  Synthetic
DIQMTQSPSSLSASVGDRVTITCRASQSISSYLNWYQQKPGKAPKLLIYAASSLQSGVPSRFSGSGSGTDFTLTISSLQPEDFATYYCQQSYITPGWTFGQGTKVEIK

SEQ ID NO: 7096 - protein, 10 aa, Artificial Sequence
  Synthetic
QQSYITPGWT

SEQ ID NO: 7097 - protein, 125 aa, Artificial Sequence
  Synthetic
EVQLVESGGDLVQPGGSLRLSCAASGFTFSSYSMNWVRQAPGKGLEWVSYISISSSTIYYADSVKGRFTISRDNAKNSLYLQMNSLRDEDTAVYYCARVAIRVVVPSATYYFDYWGQGTLVTVSS

SEQ ID NO: 7098 - protein, 18 aa, Artificial Sequence
  Synthetic
ARVAIRVVVPSATYYFDY

SEQ ID NO: 7099 - protein, 109 aa, Artificial Sequence
  Synthetic
EIVLTQSPATLSLSPGERATLSCRASQSFSSYLAWYQQKPGQAPRLLIYDASNRATGIPARFSGSGSGTDFTLTISSLEPEDFAFYYCQQRSNWPQGFTFGPGTKVDIK

SEQ ID NO: 7100 - protein, 11 aa, Artificial Sequence
  Synthetic
QQRSNWPQGFT

SEQ ID NO: 7101 - protein, 123 aa, Artificial Sequence
  Synthetic
QVQLVESGGGVVQPGRSLRLSCAASGFTFSSYGMHWVRQAPGKGLEWVAVISYDGSNKYYADSVKGRFTISRDNSKNTLYLQMNSLRAEDTAVYYCATGGGSYFSPRIYFDYWGQGTLVTVSS

SEQ ID NO: 7102 - protein, 16 aa, Artificial Sequence
  Synthetic
ATGGGSYFSPRIYFDY

SEQ ID NO: 7103 - protein, 108 aa, Artificial Sequence; identical to SEQ ID NO: 1227
  Synthetic

SEQ ID NO: 7104 - protein, 10 aa, Artificial Sequence
  Synthetic
QQYDNLPPYT

SEQ ID NO: 7105 - protein, 120 aa, Artificial Sequence
  Synthetic
EVQLVESGGGLIKPGRSLRLSCTASGFTFGDYAMTWFRQAPGKGLEWVGFIRSKAYGGTTGYAASVRYRFTISRDDSSGIAYLQMDSLKTEDTAVYYCTRWDGWSQHDYWGQGTLVTVSS

SEQ ID NO: 7106 - protein, 11 aa, Artificial Sequence
  Synthetic
TRWDGWSQHDY

SEQ ID NO: 7107 - protein, 111 aa, Artificial Sequence
  Synthetic
DIVMTQSPLSLPVTPGEPASISCRSSQSLLQSNGNNYFDWYLQKPGQSPQLLIYLGSNRASGVPDRFSGSGSGTDFTLKISRVEAEDVGVYYCMQVLQVPYTFGQGTNLEI

SEQ ID NO: 7108 - protein, 9 aa, Artificial Sequence
  Synthetic
MQVLQVPYT

SEQ ID NO: 7109 - protein, 118 aa, Artificial Sequence
  Synthetic
EVQLVESGGGLIQPGGSLRLSCAASGFTVSSNYMSWVRQAPGKGLEWVSLIYPGGSTYFADSVKGRFTISRDNSKNTLYLQMNSLRAEDTAVYYCAREGMGIAAAGTWGQGTLVTVSS

SEQ ID NO: 7110 - protein, 12 aa, Artificial Sequence
  Synthetic
AREGMGIAAAGT

SEQ ID NO: 7111 - protein, 107 aa, Artificial Sequence; identical to SEQ ID NO: 7067
  Synthetic

SEQ ID NO: 7112 - protein, 9 aa, Artificial Sequence
  Synthetic
QQYDNLPQT

SEQ ID NO: 7113 - protein, 120 aa, Artificial Sequence; identical to SEQ ID NO: 315
  Synthetic

SEQ ID NO: 7114 - protein, 13 aa, Artificial Sequence
  Synthetic
AKSWWLSENWFDP

SEQ ID NO: 7115 - protein, 107 aa, Artificial Sequence; identical to SEQ ID NO: 316
  Synthetic

SEQ ID NO: 7116 - protein, 9 aa, Artificial Sequence
  Synthetic
QQYNNWPLT

SEQ ID NO: 7117 - protein, 117 aa, Artificial Sequence; identical to SEQ ID NO: 325
  Synthetic

SEQ ID NO: 7118 - protein, 11 aa, Artificial Sequence
  Synthetic
ARDLVVWGMDV

SEQ ID NO: 7119 - protein, 107 aa, Artificial Sequence; identical to SEQ ID NO: 326
  Synthetic

SEQ ID NO: 7120 - protein, 9 aa, Artificial Sequence
  Synthetic
QLLNSYPYT

SEQ ID NO: 7121 - protein, 123 aa, Artificial Sequence
  Synthetic
QMQLVQSGPEVKKPGTSVKVSCKASGFTFTSSAVQWVRQARGQRLEWIGWIVVGSGNTNYAQKFQERVTITRDMSTSTAYMELSSLRSEDTAVYYCAAPYCSGGSCSDAFDIWGQGTMVTVSS

SEQ ID NO: 7122 - protein, 16 aa, Artificial Sequence
  Synthetic
AAPYCSGGSCSDAFDI

SEQ ID NO: 7123 - protein, 108 aa, Artificial Sequence; identical to SEQ ID NO: 3387
  Synthetic

SEQ ID NO: 7124 - protein, 9 aa, Artificial Sequence
  Synthetic
QQYGSSPWT

SEQ ID NO: 7125 - protein, 128 aa, Artificial Sequence
  Synthetic
EVQLVQSGAEVKKPGESLKISCKGSGYSFTSYWIGWVRQMPGKGLEWMGIIYPGDSDTRYSPSFQGQVTISADKSISTAYMQWSSLKASDTAMYYCARSFRDDPRIAVAGPADAFDIWGQGTMVTVSS

SEQ ID NO: 7126 - protein, 21 aa, Artificial Sequence
  Synthetic
ARSFRDDPRIAVAGPADAFDI

SEQ ID NO: 7127 - protein, 107 aa, Artificial Sequence
  Synthetic
DIQMTQSPSTLSASVGDRVTITCRASQSISYWLAWYQQKPGKAPKLLIYQASSLESGVPSRFSGSESGTEFTLTISSLQPDDFATYYCQQYNSYPYTFGQGTKLEIK

SEQ ID NO: 7128 - protein, 9 aa, Artificial Sequence
  Synthetic
QQYNSYPYT

SEQ ID NO: 7129 - protein, 117 aa, Artificial Sequence
  Synthetic
EVQLVESGGGLIQPGGSLRLSCAASGFIVSSNYMSWVRQAPGKGLEWVSVIYSGGSTFYTDSVKGRFTISRDNSKNTLYLQMNSLRAEDTAVYYCVRDYGDFYFDYWGQGTLVTVSS

SEQ ID NO: 7130 - protein, 11 aa, Artificial Sequence
  Synthetic
VRDYGDFYFDY

SEQ ID NO: 7131 - protein, 108 aa, Artificial Sequence
  Synthetic
EIVLTQSPGTLSLSPGERATLSCRASQSVSSSYLAWYQQKPGQAPRLLIYGASSRATGIPDRFSGGGSETDFTLTISRLEPEDCAVYYCQQYGSSPRTFGQGTKVEIK

SEQ ID NO: 7132 - protein, 9 aa, Artificial Sequence
  Synthetic
QQYGSSPRT

SEQ ID NO: 7133 - protein, 117 aa, Artificial Sequence
  Synthetic
EVQLVESGGGLIQPGGSLRLSCAASGFTVSYNYMSWVRQAPGKGLEWVSIIYSGGSTYYADSVKGRFTISRDNSKNTLYLQMNSLRAEDTAIYYCARDYGDLYFDYWGQGTLVTVSS

SEQ ID NO: 7134 - protein, 11 aa, Artificial Sequence
  Synthetic
ARDYGDLYFDY

SEQ ID NO: 7135 - protein, 108 aa, Artificial Sequence
  Synthetic
EIVLTQSPGTLSLSPGERATLSCRASQSVSSSYLAWYQQKPGQAPRLLIYGASSRATGIPDRFSGSGSGTDFTLTISRLEPEDFAVYYCQQYGSSPRTFGQGTRLEIK

SEQ ID NO: 7136 - protein, 9 aa, Artificial Sequence
  Synthetic
QQYGSSPRT

SEQ ID NO: 7137 - protein, 128 aa, Artificial Sequence
  Synthetic
EVQLVESGGGLVQPGGSLKLSCAASGFTFSGSAMHWVRQASGKGLEWVGRIRSKANSYATTYAASVKGRFTISRDDSKNTAYLQMNSLKTEDTAVYYCTKPHAHCGGDCYSRDWFDPWGQGTLVTVSS

SEQ ID NO: 7138 - protein, 19 aa, Artificial Sequence
  Synthetic
TKPHAHCGGDCYSRDWFDP

SEQ ID NO: 7139 - protein, 108 aa, Artificial Sequence
  Synthetic
DIQMTQSPSSLSASVGDRVTITCRASQSISSYLYWYQQKPGKAPKLLIYAASSLQSGVPSRFSGSGSGTDFTLTISSLQPEDFATYYCQQSYSTPPFTFGPGTKVDIK

SEQ ID NO: 7140 - protein, 10 aa, Artificial Sequence
  Synthetic
QQSYSTPPFT

SEQ ID NO: 7141 - protein, 125 aa, Artificial Sequence; identical to SEQ ID NO: 333
  Synthetic

SEQ ID NO: 7142 - protein, 18 aa, Artificial Sequence
  Synthetic
ARDVIVSMVRGVIFRMDV

SEQ ID NO: 7143 - protein, 110 aa, Artificial Sequence; identical to SEQ ID NO: 334
  Synthetic

SEQ ID NO: 7144 - protein, 11 aa, Artificial Sequence
  Synthetic
AAWDDSLNGVV

SEQ ID NO: 7145 - protein, 121 aa, Artificial Sequence
  Synthetic
QVQLVESGGGVVQPGRSLRLSCAASGFTFSSHAMHWVRQAPGKGLEWVAVISYDGSNKYYADSVKGRFTISRDNSKNTLYLQMNSLRAEDTAVYYCAREDYYDSSGSFDYWGQGTLVTVSS

SEQ ID NO: 7146 - protein, 14 aa, Artificial Sequence
  Synthetic
AREDYYDSSGSFDY

SEQ ID NO: 7147 - protein, 110 aa, Artificial Sequence
  Synthetic
QSALTQPASVSGSPGQSITISCTGTSSDVGGYNYVSWYQQHPGKAPKLMIYDVSNRPSGVSNRFSGSKSGNTASLTISGLQAEDEADYYCSSYTSSSTWVFGGGTKLTVL

SEQ ID NO: 7148 - protein, 10 aa, Artificial Sequence
  Synthetic
SSYTSSSTWV

SEQ ID NO: 7149 - protein, 123 aa, Artificial Sequence
  Synthetic
QLQLQESGPGLVKPSETLSLTCTVSGGSISSSSYYWGWIRQPPGKGLEWIGSIYYSGSTYYNPSLKSRVTISVDTSKNQFSLKLSSVTAADTAVYYCAGGTNPQWLDSTFDYWGQGTLVTVSS

SEQ ID NO: 7150 - protein, 15 aa, Artificial Sequence
  Synthetic
AGGTNPQWLDSTFDY

SEQ ID NO: 7151 - protein, 110 aa, Artificial Sequence
  Synthetic
QSALTQPASVSGSPGQSITISCTGTSSDVGGYNYVSWYQQHPGKAPKLMIYDVSNRPSGVSNRFSGSKSGNTASLTISGLQAEDEADYYCSSYTSSSTYVFGTGTKVTVL

SEQ ID NO: 7152 - protein, 10 aa, Artificial Sequence
  Synthetic
SSYTSSSTYV

SEQ ID NO: 7153 - protein, 120 aa, Artificial Sequence
  Synthetic
EVQLVQSGAEVKKPGESLKISCKGSGYSFISYWIGWVRQMPGKGLEWMGIIYPGDSDTRYSPSFQGQVTISADKSISTAYLQWSSLKASDTAMYYCARRPSSYSGWFDPWGQGTLVTVSS

SEQ ID NO: 7154 - protein, 13 aa, Artificial Sequence
  Synthetic
ARRPSSYSGWFDP

SEQ ID NO: 7155 - protein, 110 aa, Artificial Sequence
  Synthetic
QSVLTQPPSASGTPGQRVTISCSGSSSNIGSNTVNWYQQLPGTAPKLLIYNNNQRPSGVPDRFSGSKSGTSASLAISGLQSEDEADYYCAAWDDSLNGLVFGGGTKLTVL

SEQ ID NO: 7156 - protein, 11 aa, Artificial Sequence
  Synthetic
AAWDDSLNGLV

SEQ ID NO: 7157 - protein, 125 aa, Artificial Sequence
  Synthetic
QVQLVQSGAEVKKPGASVKVSCKASGYTFTGYYMHWVRQAPGQGLEWMGWINPNSGGTNYAQKFQGRVTMTRDTSISTAYMELSRLRSDDTAVYYCATAHPRRIQGVFFLGPGVWGQGTTVTVSS

SEQ ID NO: 7158 - protein, 18 aa, Artificial Sequence
  Synthetic
ATAHPRRIQGVFFLGPGV

SEQ ID NO: 7159 - protein, 110 aa, Artificial Sequence
  Synthetic
QSVLTQPPSASGTPGQRVTISCSGSSSNIGSNTVNWYQQLPGTAPKLLIYSNNQRPSGVPDRFSGSKSGTSASLAISGLQSEDEADYYCAAWDDSLNGVVFGGGTKLTVL

SEQ ID NO: 7160 - protein, 11 aa, Artificial Sequence
  Synthetic
AAWDDSLNGVV

SEQ ID NO: 7161 - protein, 123 aa, Artificial Sequence
  Synthetic
QVQLVQSGAEVKKPGSSVKVSCKASGGTFRSYAISWVRQAPGQGLEWMGGIIPIFGTTNYAQKFQGRVTITADESTSRAYMELSSLRSEDTAVYYCARDSSGYYYVSNWFDPWGQGTLVTVSS

SEQ ID NO: 7162 - protein, 16 aa, Artificial Sequence
  Synthetic
ARDSSGYYYVSNWFDP

SEQ ID NO: 7163 - protein, 111 aa, Artificial Sequence
  Synthetic
QSVLTQPPSVSGAPGQRVTISCTGSSSNIGAGYDVHWYQQLPGTAPNLLIYDNINRPSGVPDRFSGSKSGTSASLAITGLQAEDEADYYCQSYDSSLSGVVFGGGTKLTVL

SEQ ID NO: 7164 - protein, 11 aa, Artificial Sequence
  Synthetic
QSYDSSLSGVV

SEQ ID NO: 7165 - protein, 118 aa, Artificial Sequence
  Synthetic
EVQLVESGGGLIQPGGSLRLSCAASGFTVSSNYMSWVRQAPGKGLEWVSVIYSGGSTYYADSVKGRFTISRDNSKNTLYLQMHSLRAEDTAVYYCARGEGWDLPYDYWGQGTLVTVSS

SEQ ID NO: 7166 - protein, 12 aa, Artificial Sequence
  Synthetic
ARGEGWDLPYDY

SEQ ID NO: 7167 - protein, 111 aa, Artificial Sequence
  Synthetic
QSALTQPPSASGSPGQSVTISCTGTSSDVGGYNYVSWYQQHPGKAPKLMIYEVSKRPSGVPDRFSGSKSGNTASLTVSGLQAEDEADYYCSSYAGSNNFVVFGGGTKLTVL

SEQ ID NO: 7168 - protein, 11 aa, Artificial Sequence
  Synthetic
SSYAGSNNFVV

SEQ ID NO: 7169 - protein, 119 aa, Artificial Sequence
  Synthetic
EVQLVESGGGLVQPGGSLRLSCADSGFTFSSYWMSWVRQAPGKGLEWVANIKQDGSEKYYVDSVKGRFTISRDNAKNSLYLQMNSLRAEDTAVYYCAVQLWLRGNFDYWGQGTLVTVSS

SEQ ID NO: 7170 - protein, 12 aa, Artificial Sequence
  Synthetic
AVQLWLRGNFDY

SEQ ID NO: 7171 - protein, 111 aa, Artificial Sequence
  Synthetic
NFMLTQPHSVSESPGKTVTISCTGSSGSIASNYVQWYQQRPGSAPTTVIYEDNQRPSGVPDRFSGSIDSSSNSASLAISGLKTEDEADYYCQSYDSSNHVVFGGGTKLTVL

SEQ ID NO: 7172 - protein, 10 aa, Artificial Sequence
  Synthetic
QSYDSSNHVV

SEQ ID NO: 7173 - protein, 118 aa, Artificial Sequence
  Synthetic
EVQLVESGGGLIQPGGSLRLSCAASGFTVSSNYMSWVRQAPGKGLEWVSVIYTGGSTFYADSVKGRFTISRDNSKNTLYLQMNSLRAEDTAMYYCARGEGWDLPYDYWGQGTLVTVSS

SEQ ID NO: 7174 - protein, 12 aa, Artificial Sequence
  Synthetic
ARGEGWDLPYDY

SEQ ID NO: 7175 - protein, 111 aa, Artificial Sequence
  Synthetic
QSVLTQPPSASGSPGQSVTISCTGTSSDVGGYNYVSWYQQHPGKAPKLMIYEVRKRPSGVPDRFSGSKSGNTASLTVSGLQAEDEADYYCSSYAGSNNFVLFGGGTKLTVL

SEQ ID NO: 7176 - protein, 11 aa, Artificial Sequence
  Synthetic
SSYAGSNNFVL

SEQ ID NO: 7177 - protein, 121 aa, Artificial Sequence
  Synthetic
EVQLVESGGGLVQPGGSLRLSCAASGFTFSSYYMNWVRQAPGKGLEWVSYISSSSSTIYYADSVKGRFTISRDNAKNSLYLQMNSLRDEDTAVYYCARDPQRDPADYFDYWGQGTLVTVSS

SEQ ID NO: 7178 - protein, 14 aa, Artificial Sequence
  Synthetic
ARDPQRDPADYFDY

SEQ ID NO: 7179 - protein, 105 aa, Artificial Sequence
  Synthetic
SYVLTQPPSVSVAPGKTARITCGGNNIGSKSVHWYQQKPGQAPVLVIYYDSDRPSGIPERFSGSNSGNTATLTISRVEAGDEADYYCQVWDSSRVFGGGTKLTVL

SEQ ID NO: 7180 - protein, 8 aa, Artificial Sequence
  Synthetic
QVWDSSRV

SEQ ID NO: 7181 - protein, 120 aa, Artificial Sequence
  Synthetic
QVQLQESGPGLVKPSGTLSLTCAVSGGSISSTNWWSWVRQPPGKGLEWIGEIYHTGSTNYNPSLKSRVTISVDKSKNQFSLKLSSVTAADTAVYYCVRDGGRPGDAFDIWGQGTMVTVSS

SEQ ID NO: 7182 - protein, 13 aa, Artificial Sequence
  Synthetic
VRDGGRPGDAFDI

SEQ ID NO: 7183 - protein, 110 aa, Artificial Sequence
  Synthetic
QSALTQPASVSGSPGQSITISCTGTSSDVGGYNFVSWYQQHPGKAPKLMIYDVSNRPSGVSNRFSGSKSGNTASLTISGLQAEDEADYYCNSYTSSSTRVFGTGTKVTVL

SEQ ID NO: 7184 - protein, 10 aa, Artificial Sequence
  Synthetic
NSYTSSSTRV

SEQ ID NO: 7185 - protein, 127 aa, Artificial Sequence
  Synthetic
QVQLQESGPGLVKPSETLSLTCTVSGGSVSSGSYYWSWIRQPPGKGLEWIGYIYYSGSTNYNPSLKSRVTISVDTSKNQFSLKLSSVTAADTAVYYCATRGGYYDSSGYYALAFDIWGQGTMVTVSS

SEQ ID NO: 7186 - protein, 19 aa, Artificial Sequence
  Synthetic
ATRGGYYDSSGYYALAFDI

SEQ ID NO: 7187 - protein, 111 aa, Artificial Sequence
  Synthetic
QSALTQPASVSGSPGQSITISCTGTSSDVGGYNYVSWYQQHPGKAPKLMIYDVSNRPSGVSNRFSGSKSGNTASLTISGLQAEDEADYYCSSYTSSSTVWVFGGGTKLTVL

SEQ ID NO: 7188 - protein, 11 aa, Artificial Sequence
  Synthetic
SSYTSSSTVWV

SEQ ID NO: 7189 - protein, 121 aa, Artificial Sequence
  Synthetic
EVQLLESGGGLVQPGGSLRLSCAASGFTFSSYAMSWVRQAPGKGLEWVSGISDSGGSTYYADSVKGRFTISRDNSKNTLYLQMNSLRAEDTAVYYCAKEEVLPAVEYFQHWGQGTLVTVSS

SEQ ID NO: 7190 - protein, 14 aa, Artificial Sequence
  Synthetic
AKEEVLPAVEYFQH

SEQ ID NO: 7191 - protein, 109 aa, Artificial Sequence
  Synthetic
SYVLTQPPSVSVAPGKTARITCGGNNIGSKSVHWYQQKPGQAPVLVISYDSDRPSGIPERFSGSNSGNTATLTISRVEAGDAADYYCQVWDGSSDHHVVFGGGTKLTVL

SEQ ID NO: 7192 - protein, 12 aa, Artificial Sequence
  Synthetic
QVWDGSSDHHVV

SEQ ID NO: 7193 - protein, 122 aa, Artificial Sequence
  Synthetic
QVQLVQSGAEVKKPGASVKVSCKASGYTFTSYGFSWVRQAPGQGLEWLGWISAYNGNTNYAQKLQGRVTMTTDTSTSTAYMELRSLRSDDTAVYYCARAIAVAGTSGEFDYWGQGTLVTVSS

SEQ ID NO: 7194 - protein, 15 aa, Artificial Sequence
  Synthetic
ARAIAVAGTSGEFDY

SEQ ID NO: 7195 - protein, 111 aa, Artificial Sequence
  Synthetic
QSVLTQPPSASGTPGQRVTISCSGSSSNIGSNTVNWYQQLPGTAPKLLIYSNNQRPSGVPDRFSGSKSGTSASLAISGLQSEDEADYYCAAWDDSLNGHVVFGGGTKLTVL

SEQ ID NO: 7196 - protein, 12 aa, Artificial Sequence
  Synthetic
AAWDDSLNGHVV

SEQ ID NO: 7197 - protein, 119 aa, Artificial Sequence
  Synthetic
QVQLVQSGAEVKKPGASVKVSCKASGYTFTSYGISWVRQAPGQGLEWMGWISAYNGNTNYAQKLQGRVTMTTDTSTSTAYMELRSLRSDDTAVYYCARSQGWLQLNDYWGQGTLVTVSS

SEQ ID NO: 7198 - protein, 12 aa, Artificial Sequence
  Synthetic
ARSQGWLQLNDY

SEQ ID NO: 7199 - protein, 112 aa, Artificial Sequence
  Synthetic
NFMLTQPHSVSESPGKTVTISCTGSSGSIASNYVQWYQQRPGSAPTTMIYEDNQRPSGVPDRFSGSIDSSSNSASLTISGLKTEDEADYYCQSYDSSTPNCVFGGGTKLTVL

SEQ ID NO: 7200 - protein, 11 aa, Artificial Sequence
  Synthetic
QSYDSSTPNCV

SEQ ID NO: 7201 - protein, 120 aa, Artificial Sequence
  Synthetic
QVQLVQSGAEVKKPGASVKVSCKASGYTFTGYSMHWVRQAPGQGLEWMGWINPNSGGTNYAQKFQGRVTMTRDTSISTAYMELNRLRSDDTAVYYCARELIAVAGIFDYWGQGTLVTVSS

SEQ ID NO: 7202 - protein, 13 aa, Artificial Sequence
  Synthetic
ARELIAVAGIFDY

SEQ ID NO: 7203 - protein, 105 aa, Artificial Sequence
  Synthetic
SYVLTQPPSVSVAPGKTARITCGGNNIGSKNVHWYQQKPGQAPVLVIYYDSDRPSGIPERFSGSNSGNTATLTISRVEAGDEADYYCQVWDSSWVFGGGTKLTVL

SEQ ID NO: 7204 - protein, 8 aa, Artificial Sequence
  Synthetic
QVWDSSWV

SEQ ID NO: 7205 - protein, 122 aa, Artificial Sequence
  Synthetic
QVQLVQSGAEVKKPGASVMLSCKASGYTFTGYYMHWVRQAPGQGLEWMGWINPNSGGTNYAQKFQGRVTMTRDTSITTTYMELSRLRSDDTAVYYCARDLAFSMVRAPGDYWGQGTLVTVSS

SEQ ID NO: 7206 - protein, 15 aa, Artificial Sequence
  Synthetic
ARDLAFSMVRAPGDY

SEQ ID NO: 7207 - protein, 110 aa, Artificial Sequence; identical to SEQ ID NO: 2967
  Synthetic

SEQ ID NO: 7208 - protein, 10 aa, Artificial Sequence
  Synthetic
CSYAGSSTWV

SEQ ID NO: 7209 - protein, 117 aa, Artificial Sequence
  Synthetic
EVQLVESGGGLIQPGGSLKLSCVVSGFTVSKNYISWVRQAPGKGLEWVSVIFAGGSTFYADSVKGRFAISRDNSNNTLFLQMNSLRVEDTAIYYCARGDGELFFDHWGQGTLVTVSS

SEQ ID NO: 7210 - protein, 11 aa, Artificial Sequence
  Synthetic
ARGDGELFFDH

SEQ ID NO: 7211 - protein, 110 aa, Artificial Sequence
  Synthetic
QSVLTQPPSVSGAPGQRVTISCTGTSSNIGAGYDVHWYQQLPGRAPKVLISGNNIRPSEVPDRFSGSRSGTSASLAITSLQPEDEAQYYCQSYDSSLYAVFGGGTKLTVL

SEQ ID NO: 7212 - protein, 10 aa, Artificial Sequence
  Synthetic
QSYDSSLYAV

SEQ ID NO: 7213 - protein, 122 aa, Artificial Sequence
  Synthetic
QVQLVQSGAEVKKPGASVRVSCKASGYTFTSYGFSWVRQAPGQGLEWMGWISAYNGNTNFAQKLQGRVTMTTDTSTSTAYMELRSLRSDDTAVYYCARGEAVAGTTGFFDYWGQGTLVTVSS

SEQ ID NO: 7214 - protein, 15 aa, Artificial Sequence
  Synthetic
ARGEAVAGTTGFFDY

SEQ ID NO: 7215 - protein, 111 aa, Artificial Sequence
  Synthetic
QSVLTQPPSASGTPGQRVTISCSGSSSNIGSNYVYWYQQLPGTAPKLLIYRNNQRPSGVPDRFSGSKSGTSASLAISGLRSEDEADYYCAAWDDSLSGFVVFGGGTKLTVL

SEQ ID NO: 7216 - protein, 12 aa, Artificial Sequence
  Synthetic
AAWDDSLSGFVV

SEQ ID NO: 7217 - protein, 123 aa, Artificial Sequence
  Synthetic
QLQLQESGPGLVKPSETLSLTCTVSGGSISSSSHYWGWIRQPPGKGLEWIGTIYYSGSTYYNPSLKSRVTISVDTSKNQFSLRLSSVTAADTAVYYCASAPYLNWNDWIFDYWGQGTLVTVSS

SEQ ID NO: 7218 - protein, 15 aa, Artificial Sequence
  Synthetic
ASAPYLNWNDWIFDY

SEQ ID NO: 7219 - protein, 110 aa, Artificial Sequence
  Synthetic
QSVLTQPASVSGSPGQSITISCTGTSSDVGGYNYVSWYQQHPGEAPKLMIHDVSNRPSGVSNRFSGSKSGNTASLTISGLQAEDEADYYCSSYTSSSTLVFGGGTKLTVL

SEQ ID NO: 7220 - protein, 10 aa, Artificial Sequence
  Synthetic
SSYTSSSTLV

SEQ ID NO: 7221 - protein, 122 aa, Artificial Sequence; identical to SEQ ID NO: 7213
  Synthetic

SEQ ID NO: 7222 - protein, 15 aa, Artificial Sequence
  Synthetic
ARGEAVAGTTGFFDY

SEQ ID NO: 7223 - protein, 111 aa, Artificial Sequence; identical to SEQ ID NO: 7215
  Synthetic

SEQ ID NO: 7224 - protein, 12 aa, Artificial Sequence
  Synthetic
AAWDDSLSGFVV

SEQ ID NO: 7225 - protein, 117 aa, Artificial Sequence
  Synthetic
EVQLVESGGGLIQPGGSLKLSCVVSGFTVSKNYISWVRQAPGKGLEWVSVIFAGGSTFYADSVKGRFAISRDNSNNTLFLQMNSLRVEDTAIYYCARGDGELFFDQWGQGTLVTVSS

SEQ ID NO: 7226 - protein, 11 aa, Artificial Sequence
  Synthetic
ARGDGELFFDQ

SEQ ID NO: 7227 - protein, 110 aa, Artificial Sequence; identical to SEQ ID NO: 7211
  Synthetic

SEQ ID NO: 7228 - protein, 10 aa, Artificial Sequence
  Synthetic
QSYDSSLYAV

SEQ ID NO: 7229 - protein, 132 aa, Artificial Sequence
  Synthetic
QVQLQESGPGLVKPSETLSLTCTVSGASVSSGSYYWSWIRQPPGKGLEWIGYIYYSGSTNYNPSLKSRVTISVDTSKNQFSLKLSSVTAADTAVYYCARERPGGTYSNTWYTPTDTNWFDTWGQGTLVTVSS

SEQ ID NO: 7230 - protein, 24 aa, Artificial Sequence
  Synthetic
ARERPGGTYSNTWYTPTDTNWFDT

SEQ ID NO: 7231 - protein, 108 aa, Artificial Sequence
  Synthetic
SYVLTQPPSVSVAPGKTARITCGGNNIGSKSVHWYQQKPGQAPVLVIYFDSDRPSGIPERFSGSNSGNTATLTISRVEAGDEADYYCQVWDSSRDHVVFGGGTKLTVL

SEQ ID NO: 7232 - protein, 11 aa, Artificial Sequence
  Synthetic
QVWDSSRDHVV

SEQ ID NO: 7233 - protein, 127 aa, Artificial Sequence
  Synthetic
QVQLVQSGAEVKKPGASVKVSCKASGYTFTSYYMHWVRQAPGQGLEWMGIINPSGGSTSYAQKLQGRVTMTRDTSTSTVYMELSSLRSEDTAVYYCARANHETTMDTYYYYYYMDVWGKGTTVTVSS

SEQ ID NO: 7234 - protein, 20 aa, Artificial Sequence
  Synthetic
ARANHETTMDTYYYYYYMDV

SEQ ID NO: 7235 - protein, 111 aa, Artificial Sequence
  Synthetic
QSVLTQPASVSGSPGQSITISCTGTSSDVGGYKYVSWYQRHPGKAPKLMIYDVSNRPSGVSNRFSGSKSGNTASLTISGLQAEDEADYYCSSYTSSSTSVVFGGGTQLTVL

SEQ ID NO: 7236 - protein, 11 aa, Artificial Sequence
  Synthetic
SSYTSSSTSVV

SEQ ID NO: 7237 - protein, 125 aa, Artificial Sequence
  Synthetic
QVQLVQSGAEVKKPGASVKVSCKASGYILTDYFIHWVRQAPGQGLEWMGWINPNSGGTNYAQKFQGRVTMTRDTSISTAYMELSRLRSDDTAVYHCARYKGTTVNTNYYYGMDVWGQGTTVTVSS

SEQ ID NO: 7238 - protein, 18 aa, Artificial Sequence
  Synthetic
ARYKGTTVNTNYYYGMDV

SEQ ID NO: 7239 - protein, 106 aa, Artificial Sequence
  Synthetic
SYVLTQPPSVSVSPGQTASITCSGDKLGDKYACWYQQKAGQSPVLVIYQDSKRPSGIPERFSGSKSGNTATLTISGTQAMDEADYYCQAWDSSTVVFGGGTKLTVL

SEQ ID NO: 7240 - protein, 9 aa, Artificial Sequence
  Synthetic
QAWDSSTVV

SEQ ID NO: 7241 - protein, 127 aa, Artificial Sequence; identical to SEQ ID NO: 7233
  Synthetic

SEQ ID NO: 7242 - protein, 20 aa, Artificial Sequence
  Synthetic
ARANHETTMDTYYYYYYMDV

SEQ ID NO: 7243 - protein, 111 aa, Artificial Sequence
  Synthetic
QSALTQPASVSGSPGQSITISCTGTSSDVGGYKYVSWYQRHPGKAPKLMIYDVSNRPSGVSNRFSGSKSGNTASLTISGLQAEDEADYYCSSYTSSSTSVVFGGGTQLTVL

SEQ ID NO: 7244 - protein, 11 aa, Artificial Sequence
  Synthetic
SSYTSSSTSVV

SEQ ID NO: 7245 - protein, 125 aa, Artificial Sequence
  Synthetic
EVQLVQSGAEVKKPGESLKISCKGSGYSFTSYWIGWVRQMPGKGLEWMGILYPGDSDTTYSPSFQGQVTISADKSISTAYLQWSSLKASDTAMYYCARLHPTYYDILTGYYIDYWGQGTLVTVSS

SEQ ID NO: 7246 - protein, 18 aa, Artificial Sequence
  Synthetic
ARLHPTYYDILTGYYIDY

SEQ ID NO: 7247 - protein, 109 aa, Artificial Sequence
  Synthetic
QSALTQPASVSGSPGQSITISCTGTSSDVGSYNLVSWYQQHPGKAPKLMIYEGSKRPSGVSNRFSGSKSGNTASLTISGLQAEDEADYYCCLYAFSSIVFGGGTKLTVL

SEQ ID NO: 7248 - protein, 9 aa, Artificial Sequence
  Synthetic
CLYAFSSIV

SEQ ID NO: 7249 - protein, 120 aa, Artificial Sequence
  Synthetic
QVQLQESGPGLVKPSETLSLTCTVSGGSISNYYWSWIRQPPGKGLEWIGYIYYSGSTNYNPSLKSRVTISVDTSKNQFSLKLTSVTAADTAVYYCARILRGVAENWFDPWGQGTLVTVSS

SEQ ID NO: 7250 - protein, 14 aa, Artificial Sequence
  Synthetic
ARILRGVAENWFDP

SEQ ID NO: 7251 - protein, 109 aa, Artificial Sequence
  Synthetic
SYVLTQPPSVSVAPGKTARITCGGNNIGSKSVHWYQQKPGQAPVLVIYYDTDRPSGIPERFSGSNSGNTATLTISRVEAGDEADYYCQVWDNNSDHRGVFGGGTRLTVL

SEQ ID NO: 7252 - protein, 12 aa, Artificial Sequence
  Synthetic
QVWDNNSDHRGV

SEQ ID NO: 7253 - protein, 123 aa, Artificial Sequence
  Synthetic
EVQLVQSGAEVKKPGESLKISCKGSGYRFTSYWIAWVRQMPGKGLEWMGIIYPGDSDTRYSPSFQGQVTISADQSISTAYLQWSSLKASDTAMYYCARGGPPGGVKLELTDYWGQGALVTVSS

SEQ ID NO: 7254 - protein, 16 aa, Artificial Sequence
  Synthetic
ARGGPPGGVKLELTDY

SEQ ID NO: 7255 - protein, 111 aa, Artificial Sequence
  Synthetic
QSVLTQPPSASGTPGQRVTISCSGSSSNIGSNTVNWYQQLPGTAPQLLIYNNYQRPSGVPDRFSGSKSGTSASLAISGLQSEDEADYYCAAWDDSLNGPVVFGGGTKLTVL

SEQ ID NO: 7256 - protein, 12 aa, Artificial Sequence
  Synthetic
AAWDDSLNGPVV

SEQ ID NO: 7257 - protein, 126 aa, Artificial Sequence
  Synthetic
QLQLQESGPGLVKPSETLSLTCTVSGGSISSSSYYWGWIRQPPGKGLEWIGSIYYSGSTYYNPSLKSRVTISVDTSKNQFSLKLSSVTAADTAVYYCAGMYYDILTGYSEGAFDIWGQGTMVTVSS

SEQ ID NO: 7258 - protein, 18 aa, Artificial Sequence
  Synthetic
AGMYYDILTGYSEGAFDI

SEQ ID NO: 7259 - protein, 110 aa, Artificial Sequence
  Synthetic
QSVLTQPASVSGSPGQSITISCTGTSSDVGSYNLVSWYQQHPGKAPKLMIYEGSKRPSGVSNRFSGSKSGNTASLTISGLQAEDEADYYCCSYAGSSTWVFGGGTKLTVL

SEQ ID NO: 7260 - protein, 10 aa, Artificial Sequence
  Synthetic
CSYAGSSTWV

SEQ ID NO: 7261 - protein, 126 aa, Artificial Sequence
  Synthetic
QVQLVESGGGVVQPGRSLRLSCAASGFTFSSYGMHWVRQAPGKGLEWVAVISYDGSNKYYADSVKGRFTISRDNSKNTLDLQMNSLRAEDTAVYYCAKGGYYYYNSDSYQAEIDYWGQGTLVTVSS

SEQ ID NO: 7262 - protein, 19 aa, Artificial Sequence
  Synthetic
AKGGYYYYNSDSYQAEIDY

SEQ ID NO: 7263 - protein, 110 aa, Artificial Sequence
  Synthetic
QSVLTQPPSVSAAPGQRVTISCSGSSSNIGNNYVSWYQQLPGTAPKLLIYENNKRPSGIPDRFSGSKSGTSATLGITGLQTGDEADYYCGTWDSSLSAFVFGTGTKVTVL

SEQ ID NO: 7264 - protein, 11 aa, Artificial Sequence
  Synthetic
GTWDSSLSAFV

SEQ ID NO: 7265 - protein, 118 aa, Artificial Sequence
  Synthetic
QVQLVESGGGVVQPGRSLRLSCAASGFTFSSYAMHWVRQAPGKGLEWVAVISYDGSNKYYADSVKGRFTISRDNSKNTLYLQMNSLRAEDTAVYYCARDFYHNWFDPWGQGTLVTVSS

SEQ ID NO: 7266 - protein, 11 aa, Artificial Sequence
  Synthetic
ARDFYHNWFDP

SEQ ID NO: 7267 - protein, 112 aa, Artificial Sequence
  Synthetic
NFMLTQPHSVSESPGKTVTISCTGSSGSIASNYVQWYQQRPGSAPTTVIYEDNQRPSGVPDRFSGSIDSSSNSASLTISGLKTEDEADYYCQSYDSSNQWVVFGGGTKLTVL

SEQ ID NO: 7268 - protein, 11 aa, Artificial Sequence
  Synthetic
QSYDSSNQWVV

SEQ ID NO: 7269 - protein, 121 aa, Artificial Sequence
  Synthetic
EVQLVESGGGLVQPGRSLRLSCAASGFTFDDYAMHWVRQAPGKGLEWVSGISWNSGSRGYADSVKGRFTISRDNAKNSLYLLMNSLRAEDTAFYYCAKDDREGFGDYFDYWGQGTLVTVSS

SEQ ID NO: 7270 - protein, 14 aa, Artificial Sequence
  Synthetic
AKDDREGFGDYFDY

SEQ ID NO: 7271 - protein, 108 aa, Artificial Sequence
  Synthetic
SYVLTQPPSVSVAPGKTARITCGGNNIGSKSVHWYQQKPGQAPVLVIYYDSVRPSGIPERFSGSNSGNTATLTISRVEAGDEADYYCQVWDSSSDHYVFGTGTKVTVL

SEQ ID NO: 7272 - protein, 11 aa, Artificial Sequence
  Synthetic
QVWDSSSDHYV

SEQ ID NO: 7273 - protein, 118 aa, Artificial Sequence
  Synthetic
QVQLQESGPGLVKPSETLSLSCAVSGGSIGSYFWSWIRQPPGKGLEWIGYLHYSGSTNYNPSLKSRVTISVDTSKNQFSLKLSSVTAADTAVYYCARLQWLRGAFDIWGQGTMVTVSS

SEQ ID NO: 7274 - protein, 12 aa, Artificial Sequence
  Synthetic
ARLQWLRGAFDI

SEQ ID NO: 7275 - protein, 110 aa, Artificial Sequence
  Synthetic
NFMLTQPHSVSESPGKTVTISCTGSSGSIASNYVQWYQQRPGSAPTTVINEDNQRPSGVPDRFSGSIDSSSNSASLTISGLKTEDEADYYCQSYDSSNLVFGGGTKLTVL

SEQ ID NO: 7276 - protein, 9 aa, Artificial Sequence
  Synthetic
QSYDSSNLV

SEQ ID NO: 7277 - protein, 118 aa, Artificial Sequence
  Synthetic
QVQLQESGPRLVKPSENLSLTCTVSGGSISSYYWSWIRQPPGKGLEWIGYIYYTGSTKYNPSLKSRVTISVDTSKNQFSLKLSSVTAADTAVFYCARATTPFSGVDYWGQGTLVTVSS

SEQ ID NO: 7278 - protein, 12 aa, Artificial Sequence
  Synthetic
ARATTPFSGVDY

SEQ ID NO: 7279 - protein, 110 aa, Artificial Sequence
  Synthetic
NFMLTQPHSVSESPGKTVTISCTGSSGSIASNYVQWYQQRPGSAPTTVIYEDNQRPSGVPDRFSGSIDSSSNSASLTISGLKTEDEADYYCQSYDTSNWVFGGGTKLTVL

SEQ ID NO: 7280 - protein, 9 aa, Artificial Sequence
  Synthetic
QSYDTSNWV

SEQ ID NO: 7281 - protein, 124 aa, Artificial Sequence
  Synthetic
QVQLVESGGGVVQPGRSLRLSCAASGLTFSSYGMHWVRQAPGKGLEWVAVIWYDGINKYYADSVKGRFTISRDNSKNTLYLQMNSLRAEDTAVYYCARDRGLRLGGPKYYFDYWGQGTLVTVSS

SEQ ID NO: 7282 - protein, 17 aa, Artificial Sequence
  Synthetic
ARDRGLRLGGPKYYFDY

SEQ ID NO: 7283 - protein, 109 aa, Artificial Sequence
  Synthetic
QSVLTQPASVSGSPGQSITISCPGTSSDVGGYNYVSWYQQHPGKAPKLMIYDVSTRPSGVSNRFSGSKSGNTASLTISGLQAEDEADYYCSSYTSSSVVFGGGTKLTVL

SEQ ID NO: 7284 - protein, 9 aa, Artificial Sequence
  Synthetic
SSYTSSSVV

SEQ ID NO: 7285 - protein, 128 aa, Artificial Sequence
  Synthetic
QVQLVESGGGVVQPGRSLRLSCAASGFTFSSYAMHWVRQAPGKGLEWVAVISYDGSNKYYADSVKGRFTISRDNSKNTLYLQMNSLRAEDTAVYYCARETQGGYYGSGSYYASPFDPWGQGTLVTVSS

SEQ ID NO: 7286 - protein, 21 aa, Artificial Sequence
  Synthetic
ARETQGGYYGSGSYYASPFDP

SEQ ID NO: 7287 - protein, 109 aa, Artificial Sequence
  Synthetic
SYVLTQPPSVSVAPGKTARITCGGNNIGSKSVHWYQQKPGQAPVLVIYYDSDRPSGIPERFSGSNSGNTATLTISRVEAGDEADYYCQVWDSSSDHPVVFGGGTKLTVL

SEQ ID NO: 7288 - protein, 12 aa, Artificial Sequence
  Synthetic
QVWDSSSDHPVV

SEQ ID NO: 7289 - protein, 127 aa, Artificial Sequence
  Synthetic
QVQLQESGPGLVKPSETLSLTCTVSGGSISNYYWSWIRQPPGKGLEWIGYIYYSGSTNYNPSLKSRVTISVDTSKNQFSLKLSSVTAADTAVYYCARVEDWGYCSSTNCYSGAFDIWGQGTMVTVSS

SEQ ID NO: 7290 - protein, 21 aa, Artificial Sequence
  Synthetic
ARVEDWGYCSSTNCYSGAFDI

SEQ ID NO: 7291 - protein, 111 aa, Artificial Sequence
  Synthetic
QSVLTQPPSVSEAPRQRVTISCSGSSSNIGNNAVNWYQQLPGKAPKLLIYYDDLLPSGVSDRFSGSKSGTSASLAISGLQSEDEADYYFAAWDDSLNGAWVFGGGTKLTVL

SEQ ID NO: 7292 - protein, 12 aa, Artificial Sequence
  Synthetic
AAWDDSLNGAWV

SEQ ID NO: 7293 - protein, 126 aa, Artificial Sequence
  Synthetic
QVQLVQSGAEVKKPGASVKVSCKASGYSFTSYYMHWVRQAPGQGLEWMGIINPSGGSTSYAQKFQGRVTMTRDTSTSTVYMELSSLRSEDTAVYYCARDPSPIIARPGMGYWFDPWGQGTLVTVSS

SEQ ID NO: 7294 - protein, 19 aa, Artificial Sequence
  Synthetic
ARDPSPIIARPGMGYWFDP

SEQ ID NO: 7295 - protein, 111 aa, Artificial Sequence
  Synthetic
QSVLTQPPSVSGAPGQRVTISCTGSSSNIGAGYDVHWYQHLPGTAPKLLIYGNNNRPSGVPDRFSGSRSGTSASLAITGLQAEDEADYYCQSYDSSLSAVVFGGGTKLTVL

SEQ ID NO: 7296 - protein, 11 aa, Artificial Sequence
  Synthetic
QSYDSSLSAVV

SEQ ID NO: 7297 - protein, 127 aa, Artificial Sequence
  Synthetic
QVQLVESGGGLVQPGRSLRLSCAASGFTFSTYAMHWVRQAPGKGLKWVAVISYDGGNKYYADSVKGRFTISRDNSKNTLYLQMNSLRAEDTAVYYCARDPIWFGELLSPPFVHFDYWGQGTLVTVSS

SEQ ID NO: 7298 - protein, 20 aa, Artificial Sequence
  Synthetic
ARDPIWFGELLSPPFVHFDY

SEQ ID NO: 7299 - protein, 113 aa, Artificial Sequence
  Synthetic
QSVLTQPPSVSAAPGQKVTISCSGSSSNIGNNYVSWYQQLPGTAPKLLIYENNKRPSGIPDRFSGSKSGTSATLGITGLQTGDEADYYCGTWDSSLSAGGVYVFGTGTTVTVL

SEQ ID NO: 7300 - protein, 14 aa, Artificial Sequence
  Synthetic
GTWDSSLSAGGVYV

SEQ ID NO: 7301 - protein, 123 aa, Artificial Sequence
  Synthetic
QVQLVQSGAEVKKPGASVKVSCKASGYTFTGYYMHWVRQAPGQGLEWMGWINPNSGGTKYAQKFQGRVTMTRDTSISTAYMELSRLRSDDTAVYYCARGHDYVWGSYRYHNVWGQGTLVTVSS

SEQ ID NO: 7302 - protein, 16 aa, Artificial Sequence
  Synthetic
ARGHDYVWGSYRYHNV

SEQ ID NO: 7303 - protein, 110 aa, Artificial Sequence
  Synthetic
  misc_feature (109)..(109): Xaa can be any naturally occurring amino acid
QSVLTQPASVSGSPGQSITISCTGTSSDVGGYNYVSWYQQHPGKAPKVMIYDVSNRPSGVSNRFSGSKSGNTASLTISGLQAEDEADYYCSSYTSSSTLLFGGGTKLTXL

SEQ ID NO: 7304 - protein, 10 aa, Artificial Sequence
  Synthetic
SSYTSSSTLL

SEQ ID NO: 7305 - protein, 119 aa, Artificial Sequence
  Synthetic
EVQLVESGGGLVQPGGSLRLSCAASGFTFSSYWMSWVRQAPGKGLEWVANIKQDGSEKYYVDSVKGRFTISGDNAKNSLYLHMNSLRAEDTAVYYCAIQLWLRGGYDYWGQGTLVTVSS

SEQ ID NO: 7306 - protein, 12 aa, Artificial Sequence
  Synthetic
AIQLWLRGGYDY

SEQ ID NO: 7307 - protein, 111 aa, Artificial Sequence
  Synthetic
QSVLTQPPSASGSPGQSVTISCTGTSSDVGGYNYVSWYQQHPGKAPKLMIYEVTKRPSGVPDRFSGSKSGNTASLTVSGLQAEDEADYYCSSYAGSNNYVVFGGGTKLTVL

SEQ ID NO: 7308 - protein, 11 aa, Artificial Sequence
  Synthetic
SSYAGSNNYVV

SEQ ID NO: 7309 - protein, 132 aa, Artificial Sequence
  Synthetic
EVQLVESGGGLVKPGGSLRVSCAASGFTFSSYSMNWVRQAPGKGLEWVSSISSSKNYIYYADSVKGRFTISRDNAKNSLYLQMNSLRAEDTAVYYCTRGSRGYYDRSGYYTPLDPYYGMDVWGQGTTVTVSS

SEQ ID NO: 7310 - protein, 25 aa, Artificial Sequence
  Synthetic
TRGSRGYYDRSGYYTPLDPYYGMDV

SEQ ID NO: 7311 - protein, 112 aa, Artificial Sequence
  Synthetic
QSVLTQPPSVSGAPGQRVTISCTGSSSNIGAGYDVHWYQQLPGTAPKLLIYGNSNRPSGVPDRFSGSKSGTSASLAITGLQAEDEADYYCQSYDSSLSGSYVFGTGTKVTVL

SEQ ID NO: 7312 - protein, 12 aa, Artificial Sequence
  Synthetic
QSYDSSLSGSYV

SEQ ID NO: 7313 - protein, 127 aa, Artificial Sequence
  Synthetic
  misc_feature (58)..(58): Xaa can be any naturally occurring amino acid
QVQLVESGGGVVQPGRSLRLSCAASGFTFSNYAMHWVRQAPGKGLEWVAVISYDGSNXYYADSVKGRFTISRDNSKNTLYLQMNSLRAEDTAIYYCASGYTGYDYFVRGDYYGLDVWGQGTTVTVSS

SEQ ID NO: 7314 - protein, 20 aa, Artificial Sequence
  Synthetic
ASGYTGYDYFVRGDYYGLDV

SEQ ID NO: 7315 - protein, 111 aa, Artificial Sequence
  Synthetic
QSVLTQSPSASASLGASVKLTCTLSSGHSSYAIAWHQQQPEKGPRYLMKLNTDGSHSKGDGIPDRFSGSSSGAERYLTISSLQSEDEADYYCQTWGTGILVFGGGTKLTVL

SEQ ID NO: 7316 - protein, 9 aa, Artificial Sequence
  Synthetic
QTWGTGILV

SEQ ID NO: 7317 - protein, 118 aa, Artificial Sequence
  Synthetic
EVQLVESGGGLIQPGGSLRLSCAASGFTVSSNYMSWVRQAPGKGLEWVSVIYSGGSTYYADSVKGRFTISRDNSKNTLYLQMNSLRAEDTAVYYCARGEGWELPYDYWGQGTLVTVSS

SEQ ID NO: 7318 - protein, 12 aa, Artificial Sequence
  Synthetic
ARGEGWELPYDY

SEQ ID NO: 7319 - protein, 111 aa, Artificial Sequence
  Synthetic
QSVLTQPPSASGSPGQSVTISCTGTSSDVGGYKYVSWYQQHPGKAPKLMIYEVSKRPSGVPDRFSGSKSGNTASLTVSGLQAEDEADYYCSSYEGSNNFVVFGGGTKLTVL

SEQ ID NO: 7320 - protein, 11 aa, Artificial Sequence
  Synthetic
SSYEGSNNFVV

SEQ ID NO: 7321 - protein, 124 aa, Artificial Sequence
  Synthetic
EVQLVESGGGLVQPGRSLRLSCAASGFTFDDYAMHWVRQAPGKGLEWVSGISWNSGSIGYADSVKGRFTISRDNAKSSLYLQMKSLRVEDTALYYCAKDSLVRRNFYYYYMDVWGKGTTVTVSS

SEQ ID NO: 7322 - protein, 17 aa, Artificial Sequence
  Synthetic
AKDSLVRRNFYYYYMDV

SEQ ID NO: 7323 - protein, 111 aa, Artificial Sequence
  Synthetic
  misc_feature (110)..(110): Xaa can be any naturally occurring amino acid
QSVLTQPPSVSGAPGQRVTISCTGSSSNIGAGYDVHWYQQLPGTAPKLLIYGNSDRPSGVPDRFSGSKSGTSASLAITGLQAEDEADYYCQSYDSSLSGVVFGGGTKLTXL

SEQ ID NO: 7324 - protein, 11 aa, Artificial Sequence
  Synthetic
QSYDSSLSGVV

SEQ ID NO: 7325 - protein, 118 aa, Artificial Sequence
  Synthetic
EVQLVESGGGLVKPGGSLRLSCAASGFTFSSYSMNWVRQAPGKGLEWVSSISSSSSYIYYADSVKGRFTISRDNAKNSLYLQMNSLRAEDTAVYYCARGQLLPFADYWGQGTLVTVSS

SEQ ID NO: 7326 - protein, 11 aa, Artificial Sequence
  Synthetic
ARGQLLPFADY

SEQ ID NO: 7327 - protein, 111 aa, Artificial Sequence
  Synthetic
NFMLTQPHSVSESPGKTVTISCAGSSGSIASNYVQWYQQRPGSAPTTVIYEDNQRPSGVPDRFSGSIDSSSNSASLTISGLKTEDEADYYCQSYDSSKSWVFGGGTKLTVL

SEQ ID NO: 7328 - protein, 10 aa, Artificial Sequence
  Synthetic
QSYDSSKSWV

SEQ ID NO: 7329 - protein, 120 aa, Artificial Sequence; identical to SEQ ID NO: 7181
  Synthetic

SEQ ID NO: 7330 - protein, 13 aa, Artificial Sequence
  Synthetic
VRDGGRPGDAFDI

SEQ ID NO: 7331 - protein, 110 aa, Artificial Sequence
  Synthetic
QSVLTQPASVSGSPGQSITISCTGTSSDVGGYNYVSWYQQHPGKAPKLMIYDVSNRPSGVSNRFSGSKSGNTASLTISGLQAEDEADYYCNSYTSSSTRVFGTGTKVTVL

SEQ ID NO: 7332 - protein, 10 aa, Artificial Sequence
  Synthetic
NSYTSSSTRV

SEQ ID NO: 7333 - protein, 122 aa, Artificial Sequence
  Synthetic
QVQLQESGPGLVKPSETLSLTCTVSGGSISGYYWSWIRQPPGKGLEWIGYIYYSGSTNYNPSLKSRVTISVDTSKNQFSLKLSSVTAADTAVYYCARYGWGYDSSGYYFDYWGQGTLVTVSS

SEQ ID NO: 7334 - protein, 16 aa, Artificial Sequence
  Synthetic
ARYGWGYDSSGYYFDY

SEQ ID NO: 7335 - protein, 110 aa, Artificial Sequence
  Synthetic
QSVLTQPASVSGSPGQSITISCTGTSSDVGSYNLVSWYQEHPGKAPKLMIYEGSKRPSGVSNRFSGSKSGNTASLTISGLQAEDEADYYCCSYAGSSTWVFGGGTKLTVL

SEQ ID NO: 7336 - protein, 10 aa, Artificial Sequence
  Synthetic
CSYAGSSTWV

SEQ ID NO: 7337 - protein, 127 aa, Artificial Sequence
  Synthetic
QVQLQESGPGLVKPSETLSLTCTVSGGSISSYYWSWIRQPPGKGLEWIGYIYYSGSTNYNPSLKSRVTISVDTSKNQFSLKLSSVTAADTAVYYCARVEDWGYCSSTNCYSGAFDIWGQGTMVTVSS

SEQ ID NO: 7338 - protein, 21 aa, Artificial Sequence
  Synthetic
ARVEDWGYCSSTNCYSGAFDI

SEQ ID NO: 7339 - protein, 111 aa, Artificial Sequence
  Synthetic
QSVLTQPPSVSEAPRQRVTISCSGSSSNIGNNAVNWYQQVPGKAPKLLIYYDDLLPSGVSDRFSGSKSGTSASLAISGLQSEDEADYYCAAWDDSLNGAWVFGGGTKLTVL

SEQ ID NO: 7340 - protein, 12 aa, Artificial Sequence
  Synthetic
AAWDDSLNGAWV

SEQ ID NO: 7341 - protein, 132 aa, Artificial Sequence; identical to SEQ ID NO: 7229
  Synthetic

SEQ ID NO: 7342 - protein, 24 aa, Artificial Sequence
  Synthetic
ARERPGGTYSNTWYTPTDTNWFDT

SEQ ID NO: 7343 - protein, 108 aa, Artificial Sequence; identical to SEQ ID NO: 7231
  Synthetic

SEQ ID NO: 7344 - protein, 11 aa, Artificial Sequence
  Synthetic
QVWDSSRDHVV

SEQ ID NO: 7345 - protein, 127 aa, Artificial Sequence
  Synthetic
QVQLVESGGGVVQPGRSLRLSCAASGFTFSSYAMHWVRQAPGKGLEWVAVISYDGSNKYYADSVKGRFTISRDNSKNTLYLQMNSLRAEDTAVYYCASGYTGYDYFVGGDYYGMDVWGQGTTVTVSS

SEQ ID NO: 7346 - protein, 20 aa, Artificial Sequence
  Synthetic
ASGYTGYDYFVGGDYYGMDV

SEQ ID NO: 7347 - protein, 111 aa, Artificial Sequence
  Synthetic
QSVLTQSPSASASLGASVKLTCTLSSGHSSYAIAWHQQQPEKGPRYLMKLNSDGSHSKGDGIPDRFSGSSSGAERYLTISSLQSEDEADYYCQTWGTGILVFGGGTKLTVL

SEQ ID NO: 7348 - protein, 9 aa, Artificial Sequence
  Synthetic
QTWGTGILV

SEQ ID NO: 7349 - protein, 126 aa, Artificial Sequence
  Synthetic
EVQLVQSGAEVKQPGESLKISCKALGYTFTTSWISWVRQMPGKGLEWMGRIDPSDSYTKYSPSFQGHVTISVDKSITTAYLQWSSLKASDSAVYYCATETNSETTDMFTGYSFDPWGQGTLVTVSS

SEQ ID NO: 7350 - protein, 19 aa, Artificial Sequence
  Synthetic
ATETNSETTDMFTGYSFDP

SEQ ID NO: 7351 - protein, 110 aa, Artificial Sequence
  Synthetic
QSVLTQPPSASGTPGQRVTIACSGSSSNIGSSPVKWYKQLPGTGPKLLIYSSNQRPSGVPDRFSGSKSGTSASLAISGLQSEDEADYYCAAWDDSLSGYVFGTGTKVTVL

SEQ ID NO: 7352 - protein, 11 aa, Artificial Sequence
  Synthetic
AAWDDSLSGYV

SEQ ID NO: 7353 - protein, 121 aa, Artificial Sequence
  Synthetic
QVQLVESGGGVVQPGRSLRLSCAASGFTFSRHAMHWVRQAPGKGLEWVAVISYDGSNKYYADSVKGRFTISRDNSKNTLYLQMNSLRAEDTAVYYCAREDYYDSSGSFDYWGQGTLVTVSS

SEQ ID NO: 7354 - protein, 14 aa, Artificial Sequence
  Synthetic
AREDYYDSSGSFDY

SEQ ID NO: 7355 - protein, 110 aa, Artificial Sequence
  Synthetic
QSVLTQPASVSGSPGQSITISCTGTSSDVGGYNYVSWYQQHPGKAPKLMIYDVSNRPSGVSNRFSGSKSGNTASLTISGLQAEDEADYYCSSYTSSSTWVFGGGTKLTVL

SEQ ID NO: 7356 - protein, 10 aa, Artificial Sequence
  Synthetic
SSYTSSSTWV

SEQ ID NO: 7357 - protein, 127 aa, Artificial Sequence
  Synthetic
QVQLVESGGGVVQPGRSLRLSCAASGFTFSTYAMHWVRQAPGEGLEWVAVISYDGSNTYYADSVKGRFTISRDNSKNTLYLQMNSLRAEDTAVYYCARDPIWFGELLSPPFVHFDYWGQGTLVTVSS

SEQ ID NO: 7358 - protein, 20 aa, Artificial Sequence
  Synthetic
ARDPIWFGELLSPPFVHFDY

SEQ ID NO: 7359 - protein, 113 aa, Artificial Sequence
  Synthetic
QSVLTQPPSVSAAPGQKVTISCSGSSSNIGNNLVSWYQQLPGTAPKLLIYENNKRPSGIPDRFSGSKSGTSATLGITGLQTGDEADYYCGAWDSSLSAGGVYVFGTGTKVTVL

SEQ ID NO: 7360 - protein, 14 aa, Artificial Sequence
  Synthetic
GAWDSSLSAGGVYV

SEQ ID NO: 7361 - protein, 124 aa, Artificial Sequence
  Synthetic
QVQLVESGGGVVQPGRSLRLSCAASGFTFSSSGMHWVRQAPGKGLEWVAIISYDGSNKYYADSVKGRFTISRDNSKNTLSLQMNSLRAEDTAVYYCAKDPLPFRDFFYYYMDVWGKGTTVTVSS

SEQ ID NO: 7362 - protein, 17 aa, Artificial Sequence
  Synthetic
AKDPLPFRDFFYYYMDV

SEQ ID NO: 7363 - protein, 111 aa, Artificial Sequence
  Synthetic
QSALTQPASVSGSPGQSITISCTGTSSDVGGYNYVSWYQQHPGKAPKLMIYDVSNRPSGVSNRFSGSKSGNTASLTISGLQAEDEADYYCSSYTSSSTLGVFGTGTKVTVL

SEQ ID NO: 7364 - protein, 11 aa, Artificial Sequence
  Synthetic
SSYTSSSTLGV

SEQ ID NO: 7365 - protein, 121 aa, Artificial Sequence
  Synthetic
QVQLLESGGGLVKPGGSLRLSCAASGFTFSDYYMSWIRQAPGKGLEWVSYISSRSSYTNYADSVKGRFTISRDNAKNSLYLQMNSLRAEDTAVYYCATYRSYLPLVQVDYWGQGTLVTVSS

SEQ ID NO: 7366 - protein, 14 aa, Artificial Sequence
  Synthetic
ATYRSYLPLVQVDY

SEQ ID NO: 7367 - protein, 111 aa, Artificial Sequence
  Synthetic
NFMLTQPHSVSESPGKTVTISCTGSSGSIASNYVQWYQQRPGSAPTTVIYEDNQRPSGVPDRFSGSIDSSSNSASLTISGLKTEDEADYYCQSYDSSKHAVFGGGTQLTVL

SEQ ID NO: 7368 - protein, 10 aa, Artificial Sequence
  Synthetic
QSYDSSKHAV

SEQ ID NO: 7369 - protein, 129 aa, Artificial Sequence
  Synthetic
QVQLVQSGAEVKKPGASVKVSCKASGYTFTGYYMHWVRQAPGQGLEWMGWISPVSGGTNYAQKFQGRVTMTRDTSISTAYMELSRLRSDDTAVYYCARAPLFPTGVLAGDYYYYGMDVWGQGTTVTVSS

SEQ ID NO: 7370 - protein, 22 aa, Artificial Sequence
  Synthetic
ARAPLFPTGVLAGDYYYYGMDV

SEQ ID NO: 7371 - protein, 110 aa, Artificial Sequence
  Synthetic
QSVLTQPASVSGSPGQSITISCTGTSSDVGSYNLVSWYQQHPGKAPKLMIYEGSKRPSGVSNRFSGSKSGNTASLTISGLQAEDEADYYCCSYAGSSTLVFGGGTKLTVL

SEQ ID NO: 7372 - protein, 10 aa, Artificial Sequence
  Synthetic
CSYAGSSTLV

SEQ ID NO: 7373 - protein, 122 aa, Artificial Sequence
  Synthetic
QVQLVQSGAEVKKPGASVKVSCKASGYTFTAYYIHWVRQAPGQGLEWMGWISPISGGTKYAQKFQGRVTMTRDTSITTTYMDLSRLRSDDTAVYYCARDLKAVAISGDIDYWGQGTLVTVSS

SEQ ID NO: 7374 - protein, 15 aa, Artificial Sequence
  Synthetic
ARDLKAVAISGDIDY

SEQ ID NO: 7375 - protein, 110 aa, Artificial Sequence
  Synthetic
QSVLTQPASVSGSPGQSITISCTGTSSDVESYNLVSWYQQYPGKAPKLMIYEGSKRPSGLSNRFSGSKSGNTASLTISGLQAEDEADYYCFSYAGSNTWVFGGGTKLTVL

SEQ ID NO: 7376 - protein, 10 aa, Artificial Sequence
  Synthetic
FSYAGSNTWV

SEQ ID NO: 7377 - protein, 120 aa, Artificial Sequence
  Synthetic
EVQLVQSGAEVKRPGESLKISCKTSGYSFTSHWIGWVRQMPGKGLEWMGIIYPGDYDTRYNPSFQGQVTISADKSINTAFLQWSSLKASDSAIYYCSRRQGSYPPYFDYWGQGALVTVSS

SEQ ID NO: 7378 - protein, 13 aa, Artificial Sequence
  Synthetic
SRRQGSYPPYFDY

SEQ ID NO: 7379 - protein, 108 aa, Artificial Sequence
  Synthetic
SYVLTQPPSVSVAPGKTARITCGGNNIGSKRVHWYQQKPGQAPVLVISYDSDRPSGIPERFSGSNSGNTATLTISRVEAGDEADYYCQVWDSNSDYYVFGTGTKVTVL

SEQ ID NO: 7380 - protein, 11 aa, Artificial Sequence
  Synthetic
QVWDSNSDYYV

SEQ ID NO: 7381 - protein, 125 aa, Artificial Sequence
  Synthetic
QVQLVQSGAEVKKPGASVKVSCKASGYTFTDYFNHWVRQAPGQGLEWMGWINPNSGGTNSAQKFQGRVTMTRDTSITTVYMELSRLRSDDTAVYYCARYKGTTVNTNYYYGMDVWGQGTTVTVSS

SEQ ID NO: 7382 - protein, 18 aa, Artificial Sequence
  Synthetic
ARYKGTTVNTNYYYGMDV

SEQ ID NO: 7383 - protein, 106 aa, Artificial Sequence
  Synthetic
SYVLTQPPSVSVSPGQTASITCSGDKLRNKYACWYQQKAGQSPMLVIYQDTKRPSGIPERFSGSNSGNTATLTISGTQAMDEADYYCQAWDISTVVFGGGTKLTVL

SEQ ID NO: 7384 - protein, 9 aa, Artificial Sequence
  Synthetic
QAWDISTVV

SEQ ID NO: 7385 - protein, 123 aa, Artificial Sequence
  Synthetic
EVQLVQSGAEVKKPGESLKISCKGSGYSFTSYWIGWVRQMPGKGLEWMGIFFPGNSDARYSPSFQGQVIMSADKSISTAYLQWSSLRASDTAMYYCARNGMHYGSGSYYNGFDPWGQGTLVTV

SEQ ID NO: 7386 - protein, 18 aa, Artificial Sequence
  Synthetic
ARNGMHYGSGSYYNGFDP

SEQ ID NO: 7387 - protein, 110 aa, Artificial Sequence
  Synthetic
QSVLTQPPSASGTPGQRVTISCSGSSSNIGSNTVNWYQQLPGTAPKLLIHSNNQRPSGVPDRFSGSKSGTSASLAISGLQSEDEGDYYCATWDDSLSGVVFGGGAKVTVL

SEQ ID NO: 7388 - protein, 11 aa, Artificial Sequence
  Synthetic
ATWDDSLSGVV

SEQ ID NO: 7389 - protein, 124 aa, Artificial Sequence
  Synthetic
QVQLVESGGGVVQPGRSLRLSCAASGFIFSSYGMHWVRQAPGKGLEWVAVISYDGSKKYYADSVKGRFTISRDNSKNTLYLQMNSLRAEDTAVHYCAKDQGYGDFYYYFGMDVWGQGTTVTVSS

SEQ ID NO: 7390 - protein, 17 aa, Artificial Sequence
  Synthetic
AKDQGYGDFYYYFGMDV

SEQ ID NO: 7391 - protein, 109 aa, Artificial Sequence
  Synthetic
QSALTQPPSVSGSPGQSVTISCTGTSSDVGSYNRVSWYQQPPGTAPKLMIYEVTNRPSGVPDRFSGSKSGNTASLTISGLQAEDEADYYCSSYTSSSLIFGGGTKLTVL

SEQ ID NO: 7392 - protein, 9 aa, Artificial Sequence
  Synthetic
SSYTSSSLI

SEQ ID NO: 7393 - protein, 118 aa, Artificial Sequence
  Synthetic
QVQLQESGPGLVKPSETLSLTCTVSGDSISSYFWSWIRQPPGRGLEWIGYIHDSVNTNYNPSLKSRVTISVDTSKSQFSLRLSSVTAADTAVYYCARCAWLRGSFDYWGQGTMVTVSS

SEQ ID NO: 7394 - protein, 12 aa, Artificial Sequence
  Synthetic
ARCAWLRGSFDY

SEQ ID NO: 7395 - protein, 111 aa, Artificial Sequence
  Synthetic
NFMLTQPHSVSESPGKTVTISCTGSSGSIASNYVQWYQQRPGSAPTTVIYEDNQRPSGVPDRFSGSIDSSSNSASLTISGLKTEDEADYYCQSYDFSSHYVFGTGTKVTVL

SEQ ID NO: 7396 - protein, 10 aa, Artificial Sequence
  Synthetic
QSYDFSSHYV

SEQ ID NO: 7397 - protein, 128 aa, Artificial Sequence
  Synthetic
EVQLVESGGGLVQPGGSLRLSCAASGFIFSRYWMHWVRQAPGKGLVWVSRINSDGSNTTYADSVKGRFTISRDNAKNTLYLQMNSLRAEDTAVYYCARDLEYYDFWSGLSGDWSFDLWGRGTLVTVSS

SEQ ID NO: 7398 - protein, 21 aa, Artificial Sequence
  Synthetic
ARDLEYYDFWSGLSGDWSFDL

SEQ ID NO: 7399 - protein, 109 aa, Artificial Sequence
  Synthetic
QSVLTQPPSVSGAPGQRVTISCTGSSSNIGAGYDVQWYQQLPGTAPKLLIYGNSNRPSGVPDRFSGSKSGTSASLAITGLQAEDEASYYCQSYDSSLEVFGTGTKVTVL

SEQ ID NO: 7400 - protein, 9 aa, Artificial Sequence
  Synthetic
QSYDSSLEV

SEQ ID NO: 7401 - protein, 129 aa, Artificial Sequence
  Synthetic
EVQLVQSGAEVKKPGESLKISCKGSGYRFTSYWIGWVRQMPGKGLEWMAIIFPGDSETRYSPSFQGQVTISADKSISTAYLQWSSLKASDTAMYYCARLLHYYDRSGYSGATDDAFDIWGQGTMVTVSS

SEQ ID NO: 7402 - protein, 22 aa, Artificial Sequence
  Synthetic
ARLLHYYDRSGYSGATDDAFDI

SEQ ID NO: 7403 - protein, 112 aa, Artificial Sequence
  Synthetic
QSVLTQPPSVSGAPGQRVTISCTGSSSNIGAGYDVHWYQQLPGTAPKLLIYGNSNRPSGVPDRFSGSKSGTSASLAITGLQAEDEADYYCQSYDSSLSGLVLFGGGTKLTVL

SEQ ID NO: 7404 - protein, 12 aa, Artificial Sequence
  Synthetic
QSYDSSLSGLVL

SEQ ID NO: 7405 - protein, 123 aa, Artificial Sequence
  Synthetic
EVQLLESGGGLVQPGGSLRLSCAASGFTFSSYVMSWVRQAPGKGLEWVSGISGSGGSPYYADSVKGRFTISRDNSKNTLYLQMNSLRAEDTAVYYCAKDGDIVVALNDGFDIWGQGTMVTVSS

SEQ ID NO: 7406 - protein, 16 aa, Artificial Sequence
  Synthetic
AKDGDIVVALNDGFDI

SEQ ID NO: 7407 - protein, 109 aa, Artificial Sequence
  Synthetic
SYVLTQPPSVSVAPRKTARITCGGHNIGSKNVHWYQQRPGQAPVLVIYSDSDRPSGIPERFSGSNSGNTATLTISRIEAGDEADYYCQVWDGSSDHPVIFGGGTKLTVL

SEQ ID NO: 7408 - protein, 12 aa, Artificial Sequence
  Synthetic
QVWDGSSDHPVI

SEQ ID NO: 7409 - protein, 117 aa, Artificial Sequence
  Synthetic
EVQLVESGGGLIQPGGSLKLSCVVSGFTVSRNYISWVRQAPGKGLEWVSVLFAGGSTFYADSVKGRFAISRDNSNNTLFLQMNSLRVEDTAIYYCARGDGELIFDQWGQGTLVTVSS

SEQ ID NO: 7410 - protein, 11 aa, Artificial Sequence
  Synthetic
ARGDGELIFDQ

SEQ ID NO: 7411 - protein, 110 aa, Artificial Sequence
  Synthetic
QSVLTQPPSVSGAPGQRVTIVCTGTSSNIGAGYDVHWYQQLPGRAPKVLVSGNNIRPSEVPDRFSGSRSGTSASLAITSLQPEDEAQYYCQSYDSNLYAVFGGGTKLTVL

SEQ ID NO: 7412 - protein, 10 aa, Artificial Sequence
  Synthetic
QSYDSNLYAV

SEQ ID NO: 7413 - protein, 117 aa, Artificial Sequence
  Synthetic
EVQLVESGGGLIQPGGSLRLSCAASGFSVSSNFMSWVRQAPGKGLEWVSLIYTGGSTYYADSVKGRFTISRDNSNNTLYLQMNSLRADDTAVYYCARTLGWWELDPWGQGTLVTVSS

SEQ ID NO: 7414 - protein, 11 aa, Artificial Sequence
  Synthetic
ARTLGWWELDP

SEQ ID NO: 7415 - protein, 110 aa, Artificial Sequence
  Synthetic
QSVLTQPPSVSGVPRQRVTISCSGSNSNIGNNAVNWYQQLPGKAPKLLIYYNDLLPSGFSDRFSGSKSGTSASLAISGLQSEDEADYYCAAWDDSLNGPVFGGGTKVTVL

SEQ ID NO: 7416 - protein, 11 aa, Artificial Sequence
  Synthetic
AAWDDSLNGPV

SEQ ID NO: 7417 - protein, 122 aa, Artificial Sequence
  Synthetic
QVQLQESGPGLVKPSQTLSLTCTVSGGSISSGGYHWSWIRQHPGKGLEWIGYIYYSGNTYYNPSLKSRVTMSLDTSKSQFSLNLSSVTAADTAVYYCARFDVFIPADAFDIWGQGTLVTVSS

SEQ ID NO: 7418 - protein, 14 aa, Artificial Sequence
  Synthetic
ARFDVFIPADAFDI

SEQ ID NO: 7419 - protein, 109 aa, Artificial Sequence
  Synthetic
QFVLTQPRSVSGSPGQSVTISCTGTSSDVGGYNYVSWYQQHPGKVPKLLTYDVSKRPSGVPDRFSGSKSGNTASLTISGLQAEDEADYYCCSYAGTYTVVFGGGTKVTV

SEQ ID NO: 7420 - protein, 10 aa, Artificial Sequence
  Synthetic
CSYAGTYTVV

SEQ ID NO: 7421 - protein, 125 aa, Artificial Sequence
  Synthetic
QLQLQESGPGLVKPSETLSLTCTVSGGSISSSNDYWGWIRQPPGKGLEWIGSIFYSGITYYNPSLESRVTISVDTSKNQFSLKLSSVTAADTAVFYCARLIRYCSTTSCYSFDFWGQGTLVTVSS

SEQ ID NO: 7422 - protein, 17 aa, Artificial Sequence
  Synthetic
ARLIRYCSTTSCYSFDF

SEQ ID NO: 7423 - protein, 110 aa, Artificial Sequence
  Synthetic
QSVLTQPASVSGSPGQSITISCTGTTSDVGSYNLVSWYQQHPGKAPKVMIFEVDKRPSGVSNRFSGSKSGNTASLTISGLQAEDEADYYCCSYVGSSSVIFGGGTKLTVL

SEQ ID NO: 7424 - protein, 10 aa, Artificial Sequence
  Synthetic
CSYVGSSSVI

SEQ ID NO: 7425 - protein, 122 aa, Artificial Sequence
  Synthetic
QVQLQESGPGLVKPSQTLSLTCTVSGGSISSGGYYWTWIRQYPGEGLEWIGYIYHSGSAYYNPSLKSRVTMSVDTSKNQFSLKLSSVTAADTAVYYCARAIVVVTLNWFDPWGQGTLVSVSS

SEQ ID NO: 7426 - protein, 14 aa, Artificial Sequence
  Synthetic
ARAIVVVTLNWFDP

SEQ ID NO: 7427 - protein, 111 aa, Artificial Sequence
  Synthetic
NFMLTQPHSVSESPGKTVTISCTGSSGSIASNYVQWYQQRPGSAPTAVIYEDNQRPSGVPDRFSGSIDSSSNSASLTISGLKTEDEADYYCQSYDSSNPVVFGGGTKLTVL

SEQ ID NO: 7428 - protein, 10 aa, Artificial Sequence
  Synthetic
QSYDSSNPVV

SEQ ID NO: 7429 - protein, 119 aa, Artificial Sequence
  Synthetic
QVQLVESGGGLVKPGGSLRLSCAVSGIDFTDYFMSWVRQAPGKGLEWISYIRSGNSYTDYADSVKGRFTISTDNAKNSLYLQMNSLRAEDTAVYYCASAPWLRGHFDYWGQGALVTVSS

SEQ ID NO: 7430 - protein, 12 aa, Artificial Sequence
  Synthetic
ASAPWLRGHFDY

SEQ ID NO: 7431 - protein, 111 aa, Artificial Sequence
  Synthetic
NFMLTQPHSVSESPGKTVTISCTGSSGSIASNYVHWYQQRPGSAPTTVIYEDNQRPSGVPDRFSGSIDSSSNSASLTISGLKTDDEADYYCQSFDSNTGRVFGGGTKLTVL

SEQ ID NO: 7432 - protein, 10 aa, Artificial Sequence
  Synthetic
QSFDSNTGRV

SEQ ID NO: 7433 - protein, 127 aa, Artificial Sequence
  Synthetic
QVQLVQSGAEVKKPGASVKVSCKASGYTFTSYYMHWVRQAPGQGLEWMGIINPTGGTTRYAQKFQGRVTMTRDTSTSTVYMELSSLRSEDTAVYYCARAPLYYDILTGYYPGAYDYWGQGTLVTVSS

SEQ ID NO: 7434 - protein, 20 aa, Artificial Sequence
  Synthetic
ARAPLYYDILTGYYPGAYDY

SEQ ID NO: 7435 - protein, 110 aa, Artificial Sequence; identical to SEQ ID NO: 1803
  Synthetic

SEQ ID NO: 7436 - protein, 10 aa, Artificial Sequence
  Synthetic
SSYTSSSTVV

SEQ ID NO: 7437 - protein, 116 aa, Artificial Sequence
  Synthetic
QVQLVESGGGVVQPGRSLRVSCAASGFTFSTFAMHWVRQAPGKGLEWVAVISYDGGNRFYVDSVEGRFTISRDNSKNTLSLQMNSLRTEDTAVYYCARGGFGGLWFGQGTLVTVSS

SEQ ID NO: 7438 - skipped

SEQ ID NO: 7439 - protein, 113 aa, Artificial Sequence
  Synthetic
NFMLTQPHSMSESPGKTVTISCTGSGGSIALNYVEWYQQRPGSAPTTVIYEDNQRPSGVPDRFSGSIDSSSNSASLTISGLKTEDEADYYCQSYDGTTRGHVVFGGGTKLTVL

SEQ ID NO: 7440 - protein, 12 aa, Artificial Sequence
  Synthetic
QSYDGTTRGHVV

SEQ ID NO: 7441 - protein, 120 aa, Artificial Sequence
  Synthetic
EVQLVESGGGLVQPGGSLRLSCAASGFTFSSYRMHWVRQAPGKGPVWVSRINSDESNISYADSVKGRFTISRDNAKNTLYLQMNSLRAEDTAVYYCAREVHNEPGDYFDYWGQGTLVSVS

SEQ ID NO: 7442 - protein, 14 aa, Artificial Sequence
  Synthetic
AREVHNEPGDYFDY

SEQ ID NO: 7443 - protein, 108 aa, Artificial Sequence
  Synthetic
SYVLTQPPSVSVAPGKTARITCGGNNIGSKSVHWYQQKPGQAPVLVIYYDSDRPSGIPERFSGSNSGNTATLTISRVEAGDEADYYCQVWDSSGDHWVFGGGTKLTVL

SEQ ID NO: 7444 - protein, 11 aa, Artificial Sequence
  Synthetic
QVWDSSGDHWV

SEQ ID NO: 7445 - protein, 120 aa, Artificial Sequence
  Synthetic
QVQLQESGPGLVKPSETLSLTCTVSGGSVFSGTYYWSWIRQPPGKGLEWIGYIYYSGSTNYNPSLKSRVTISIDPSKNQFSLNLSSVTAADTAVYYCARGSRSSYYFDYWGQGALVTVSS

SEQ ID NO: 7446 - protein, 12 aa, Artificial Sequence
  Synthetic
ARGSRSSYYFDY

SEQ ID NO: 7447 - protein, 110 aa, Artificial Sequence
  Synthetic
QSVLTQPPSVSAAPGQKVTISCSGSSSNIGNNYVSWYQQLPGTAPKLLIYEDNKRPSGIPDRFSGSKSGTSATLGIAGLQTGDEADYYCGTWDSSLSVPFVFGTGTKVTV

SEQ ID NO: 7448 - protein, 12 aa, Artificial Sequence
  Synthetic
GTWDSSLSVPFV

SEQ ID NO: 7449 - protein, 124 aa, Artificial Sequence; identical to SEQ ID NO: 295
  Synthetic

SEQ ID NO: 7450 - protein, 16 aa, Artificial Sequence
  Synthetic
ARAMITFGGVIVVLDY

SEQ ID NO: 7451 - protein, 111 aa, Artificial Sequence
  Synthetic
QSVLTQPPSASGSPGQSVTISCTGTSTDVGGYNFVSWYQQHPGKAPKLMIYEVSKRPSGVPDRFSGSKSGNTASLTVSGLQAEDEADYYCSSYAGSNILYVFGTGTKVTVL

SEQ ID NO: 7452 - protein, 11 aa, Artificial Sequence
  Synthetic
SSYAGSNILYV

SEQ ID NO: 7453 - protein, 130 aa, Artificial Sequence
  Synthetic
QVQLVESGGGVVQPGRSLRLSCSASGFTFSSYAFHWVRQAPGKGLEWVAVVSHDGNNKFYADSVKGRLAIYRDNSKNTLYLQMISLQAEDTALYYCARDLGVVLPGPADDYFYFYGMDVWGLGTTVTVSS

SEQ ID NO: 7454 - protein, 23 aa, Artificial Sequence
  Synthetic
ARDLGVVLPGPADDYFYFYGMDV

SEQ ID NO: 7455 - protein, 108 aa, Artificial Sequence
  Synthetic
SYVLTQPPSVSVSPGQTARISCSGGALPKQYGYWYQQKPGQAPVLVIYKDSERPSGIPERFSGSSSGTAVTLTISGVQAEDEADYYCQSADRSGMSRVFGGGTKLTVL

SEQ ID NO: 7456 - protein, 11 aa, Artificial Sequence
  Synthetic
QSADRSGMSRV

SEQ ID NO: 7457 - protein, 120 aa, Artificial Sequence
  Synthetic
QVQLQESGPGLVKPSGTLSLTCAVSGGSISTVNWWSWVRQPPGKGLEWIGEIHHSGNTNHNPSLRSRVTISVDKSKNQFSLKLRSVTAADTAVYYCARDGGRPGDAFDLWGQGTMVTVSS

SEQ ID NO: 7458 - protein, 13 aa, Artificial Sequence
  Synthetic
ARDGGRPGDAFDL

SEQ ID NO: 7459 - protein, 109 aa, Artificial Sequence
  Synthetic
QSVLTQPASVSGSPGQSITISCTGTSSDVGGYNYVSWYQQHPGKVPKVMIYDVSNRPSGISNRFSGSKSGNTASLTISGLQAEDEADYYCNSYRSNSTRVFGTGTKVTV

SEQ ID NO: 7460 - protein, 10 aa, Artificial Sequence
  Synthetic
NSYRSNSTRV

SEQ ID NO: 7461 - protein, 120 aa, Artificial Sequence
  Synthetic
QVQLQESGPGLVKPSQTLSLTCTVSGGSISRYYWSWLRQHPGKGLEWIGCIYDSGSTNYNPSLKSRLTISVDTSQNQLSLKLASVTAADAAVYYCARVPVGWEPPGFDLWGQGTTVTVSS

SEQ ID NO: 7462 - protein, 14 aa, Artificial Sequence
  Synthetic
ARVPVGWEPPGFDL

SEQ ID NO: 7463 - protein, 107 aa, Artificial Sequence
  Synthetic
SYVLTQPPSVSVAPGKTARVTCGGNNIGSKSVHWYQQKPGQAPVLVIYYDTDRPSGIPERFSGSNSGNTATLTISRVEAGDEADYYCQVWDSSSDHPVFGGGTKLTV

SEQ ID NO: 7464 - protein, 11 aa, Artificial Sequence
  Synthetic
QVWDSSSDHPV

SEQ ID NO: 7465 - protein, 123 aa, Artificial Sequence
  Synthetic
EVQLVQSGAEVKKPGESLKISCKGSGYTFTNYWIGWVRQMPGKGLEWMGIIYPGDSDTRYSPSFQGQVTISADKSISTAYLQWSSLKASDTAMYYCAIGALQMATIIDAFDIWGQGTMVTVSS

SEQ ID NO: 7466 - protein, 16 aa, Artificial Sequence
  Synthetic
AIGALQMATIIDAFDI

SEQ ID NO: 7467 - protein, 110 aa, Artificial Sequence
  Synthetic
QSVLTQPPSASGTPGQRVTISCSGSSSNIGGNAVNWYQQLPGTAPKLLIYTNNQRPSGVPDRFSGSKSGTSASLSISGLQSEDEADYYCAAWDDSLNGVVFGGGTKLTAL

SEQ ID NO: 7468 - protein, 11 aa, Artificial Sequence
  Synthetic
AAWDDSLNGVV

SEQ ID NO: 7469 - protein, 117 aa, Artificial Sequence
  Synthetic
EVQLVESGGGLIQPGGSLRLSCAASGLTVSRNYMTWVRQAPGKGLEWVSVIYSGGTTHYADSVKGRFTISRDNSKNTLYLQMNSLRAEDTAVYYCARDLAVYGMDVWGQGTTVTVSS

SEQ ID NO: 7470 - protein, 11 aa, Artificial Sequence
  Synthetic
ARDLAVYGMDV

SEQ ID NO: 7471 - protein, 109 aa, Artificial Sequence
  Synthetic
QSVLTQPPSVSGAPGQRVTISCTGSSSNIGAGSDVHWYQKLPGTAPKVLVYGYSNRPSGVPDRFSGSKSGTSASLAITGLQAEDEADYYCQSYDTSLRVLFGGGTKLTV

SEQ ID NO: 7472 - protein, 10 aa, Artificial Sequence
  Synthetic
QSYDTSLRVL

SEQ ID NO: 7473 - protein, 122 aa, Artificial Sequence
  Synthetic
QVQLVQSGAEVKKPGASVMLSCKASGYTFTSYGISWVRQAPGQGLEWMGWISAYNGNTNYAQKLQGRVSMTTDTSTSTAYMELRSLRSDDTAVYYCARAMAVAGTSGDFDYWGQGTLVTVSS

SEQ ID NO: 7474 - protein, 15 aa, Artificial Sequence
  Synthetic
ARAMAVAGTSGDFDY

SEQ ID NO: 7475 - protein, 111 aa, Artificial Sequence; identical to SEQ ID NO: 7195
  Synthetic

SEQ ID NO: 7476 - protein, 12 aa, Artificial Sequence
  Synthetic
AAWDDSLNGHVV

SEQ ID NO: 7477 - protein, 124 aa, Artificial Sequence
  Synthetic
QVQLVQSGAEVKKSGSSVKVSCKASGGSFSSYAISWVRQAPGQGLEWMGGIIPIFGTAKYAQKFQGRVTITADESTSTAYMELSSLRSEDTAVYYCASRWEQLNGGSWHYFDYWGQGTLVTVSS

SEQ ID NO: 7478 - protein, 17 aa, Artificial Sequence
  Synthetic
ASRWEQLNGGSWHYFDY

SEQ ID NO: 7479 - protein, 112 aa, Artificial Sequence
  Synthetic
QSVLTQPASVSGSPGQSITISCTGTRSDVGRNNLVSWYQHHPGKAPKVMIYEGSKRPSGVSTRFSGSKSGNTASLTISGLQAEDEADYYCCSYAGSSTFEGVFGGGTKLTVL

SEQ ID NO: 7480 - protein, 12 aa, Artificial Sequence
  Synthetic
CSYAGSSTFEGV

SEQ ID NO: 7481 - protein, 123 aa, Artificial Sequence
  Synthetic
EVQLVQSGAEVKKAGESLKISCNSSGYSFTNYWIAWVRQVPGKGLEWMGIIYLGDSDTRYSPSFQGRVTISADKSISAAYLHWSSLKASDTAIYYCARGGPPGGVKLELTDFWGQGTLVTVSS

SEQ ID NO: 7482 - protein, 16 aa, Artificial Sequence
  Synthetic
ARGGPPGGVKLELTDF

SEQ ID NO: 7483 - protein, 111 aa, Artificial Sequence
  Synthetic
QSVLTQPPSASGTPGQRVTISCSGSNSNIGDNTVHWYQQLPGTAPKLLIFNNNQRPSGVPDRFSGSKSGTSASLAISGLQSDDEADYYCAAWDDSLDGPVVFGGGTKLTVL

SEQ ID NO: 7484 - protein, 12 aa, Artificial Sequence
  Synthetic
AAWDDSLDGPVV

SEQ ID NO: 7485 - protein, 123 aa, Artificial Sequence
  Synthetic
QVQLVQSGAEVKKPGASVKVSCKASGYTFTGFFIHWVRQAPGQGLEWMGWINPISGGTNYAQKFQGRVTVTRDTSITTVYVEVSSLRSDDTAVYYCARSNDIVAASTFYFHFWGQGTLVTVSS

SEQ ID NO: 7486 - protein, 16 aa, Artificial Sequence
  Synthetic
ARSNDIVAASTFYFHF

SEQ ID NO: 7487 - protein, 107 aa, Artificial Sequence
  Synthetic
SYVLTQPPSVSVAPGKTARITCGGKNFGSKSVHWYQQKPGQAPVLVIYYDTDRPSGIPERFSGSNSGNTATLTISGVEAGDEADYYCQVWYSSSDGVFGGGTKLTVL

SEQ ID NO: 7488 - protein, 10 aa, Artificial Sequence
  Synthetic
QVWYSSSDGV

SEQ ID NO: 7489 - protein, 120 aa, Artificial Sequence
  Synthetic
EVQLVESGGGLIQPGGSLRLSCAASGFTVSSNYMSWVRQAPGKGLEWVSVIYSGGSTYYADSVKGRFTISRDNSKNTLYLQMNSLRAEDTAVYYCARELTHDVTPYFDYWGQGTLVTVSS

SEQ ID NO: 7490 - protein, 14 aa, Artificial Sequence
  Synthetic
ARELTHDVTPYFDY

SEQ ID NO: 7491 - protein, 112 aa, Artificial Sequence
  Synthetic
QSVLTQPPSVSGAPGQRVTISCTGSSSNIGAGYDVHWYQQLPGTAPKLLIYGNSNRPSGVPDRFSGSKSGTSASLAITGLQAEDEADYYCQSYDSSLSGWGVFGGGTKLTVL

SEQ ID NO: 7492 - protein, 12 aa, Artificial Sequence
  Synthetic
QSYDSSLSGWGV

SEQ ID NO: 7493 - protein, 119 aa, Artificial Sequence
  Synthetic
EVQLVQSGAEVKKPGESLRISCKGSGYSFSSYWITWVRQRPGKGLEWMGKIDPSDSYLNYSPSFQGHVTISADKSTRTAYLQWSSLKASDTAMYYCARHWGRFGEGDYWGQGTLVTVSS

SEQ ID NO: 7494 - protein, 12 aa, Artificial Sequence
  Synthetic
ARHWGRFGEGDY

SEQ ID NO: 7495 - protein, 112 aa, Artificial Sequence
  Synthetic
QSVLTQPPSVSGAPGQKVTISCTGSSSNIGAGYNLHWYQQLPGAAPKLLIDANGNRPSGVPDRFSGSKSGTSASLAITGLQAEDEADYYCQSYDSSLVPSWVFGGGTKLTVL

SEQ ID NO: 7496 - protein, 12 aa, Artificial Sequence
  Synthetic
QSYDSSLVPSWV

SEQ ID NO: 7497 - protein, 120 aa, Artificial Sequence
  Synthetic
QVQLQESGPGLVKPSETLSLTCTVSGGSVINGSYYWSWIRQPPGKGLEWIGFVYYSGSTNYNPSLKSRVTISVDTSKNQFSLNLNSVTAADTAVYYCATGSKSSYYFDYWGQGTLVTVSS

SEQ ID NO: 7498 - protein, 12 aa, Artificial Sequence
  Synthetic
ATGSKSSYYFDY

SEQ ID NO: 7499 - protein, 111 aa, Artificial Sequence
  Synthetic
QSVLTQPPSVSAAPGQKVTISCSGSSSNIGNNYVSWYQQLPGAAPKLLIYENNMRPSGIPDRFSGSKSGTSATLGITGLQTGDEADYYCGTWDSSLSVPYVFGTGTRVTVL

SEQ ID NO: 7500 - protein, 12 aa, Artificial Sequence
  Synthetic
GTWDSSLSVPYV

SEQ ID NO: 7501 - protein, 117 aa, Artificial Sequence; identical to SEQ ID NO: 321
  Synthetic

SEQ ID NO: 7502 - protein, 11 aa, Artificial Sequence
  Synthetic
AKPVDAAMFDF

SEQ ID NO: 7503 - protein, 109 aa, Artificial Sequence
  Synthetic
SYVLTQPPSVSVAPGKTARITCGGNNIGSKSVHWYQQRPGQAPVLVIYYDSDRPSGIPERFSGSNSGNTATLTISRVEAGDEADFYCQVWDRSTNHLVVFGGGTQLTVL

SEQ ID NO: 7504 - protein, 12 aa, Artificial Sequence
  Synthetic
QVWDRSTNHLVV

SEQ ID NO: 7505 - protein, 118 aa, Artificial Sequence
  Synthetic
EVQLVQSGAEVKKPGESLKISCKGSGYSFTSYWIGWVRQMPGKGLEWMGIIYPGDSDTRYSPSFQGQVTISADKSISTAYLQWSSLKASDTAMYYCARRGSAWEIDYWGQGTLVTVSS

SEQ ID NO: 7506 - protein, 11 aa, Artificial Sequence
  Synthetic
ARRGSAWEIDY

SEQ ID NO: 7507 - protein, 110 aa, Artificial Sequence
  Synthetic
QSVLTQPPSASGTPGQRVTISCSGSTSNIGSNTVNWYQQLPGTAPKLLIYNNNQRPSGVPDRMSGSKSGTSASLAISGLQSEDEADYYCAAWDDSLNGYVFGTGTKVTVL

SEQ ID NO: 7508 - protein, 11 aa, Artificial Sequence
  Synthetic
AAWDDSLNGYV

SEQ ID NO: 7509 - protein, 122 aa, Artificial Sequence; identical to SEQ ID NO: 285
  Synthetic

SEQ ID NO: 7510 - protein, 15 aa, Artificial Sequence
  Synthetic
ARGRANWNSNFLLDS

SEQ ID NO: 7511 - protein, 111 aa, Artificial Sequence
  Synthetic
QSVLTQPASVSGSPGQSITISCTGTSSDVGGYNLVSWYQQYPGNVPKLMIYEDAKRPSGVSNRFSGSKSANTASLTISGLQAEDEADYYCCSYAGSSTRYVFGTGTKVTVL

SEQ ID NO: 7512 - protein, 11 aa, Artificial Sequence
  Synthetic
CSYAGSSTRYV

SEQ ID NO: 7513 - protein, 122 aa, Artificial Sequence
  Synthetic
QVQLVQSGAEVKKPGASVKVSCKASGYIFTGYYMHWVRQAPGQGLEWIGWINPNSGGTNSTQKFQGRVTMTRDKSISTVYMELSRLRSDDTAVYYCARDLAFSMVRGVFDHWGQGTLVTVSS

SEQ ID NO: 7514 - protein, 15 aa, Artificial Sequence
  Synthetic
ARDLAFSMVRGVFDH

SEQ ID NO: 7515 - protein, 110 aa, Artificial Sequence
  Synthetic
QSVLTQPASVSGSPGQSITISCTGTSSDVGSYNLVSWYQQHPGKAPKLMIYEGSKWPSGVSNRFSGSKSGNTASLTISGLQAEDEADYYCCSYAGSNSWVFGGGTKLTVL

SEQ ID NO: 7516 - protein, 10 aa, Artificial Sequence
  Synthetic
CSYAGSNSWV

SEQ ID NO: 7517 - protein, 125 aa, Artificial Sequence
  Synthetic
QVQLVQSGAEVKKPGASVKVSCEASGYTLSTYDINWVRQATGQGLEWMGWMKPSSGHTGYAQKFQGRVTMTRNTSISTAYMELSGLRSEDTAVYYCVRNIGGYGFGGGYNWFDPWGQGTLVTVSS

SEQ ID NO: 7518 - protein, 18 aa, Artificial Sequence
  Synthetic
VRNIGGYGFGGGYNWFDP

SEQ ID NO: 7519 - protein, 110 aa, Artificial Sequence
  Synthetic
QSVLTQPPSVSAAPGQKVTISCSGSSSNIENNYVSWYQQLPGTAPQLLIYDNNKRPSGIPGRFSGSKSGTSATLGITGLQTGDEAEYYCGTWDRSLSAYVFGTGTKVTVL

SEQ ID NO: 7520 - protein, 11 aa, Artificial Sequence
  Synthetic
GTWDRSLSAYV

SEQ ID NO: 7521 - protein, 122 aa, Artificial Sequence
  Synthetic
QLQLQESGPGLVKPSETLSLTCTVSGGSISTSSYFWGWIRQPPEKGLEWIGSIYSSGSTYYNPSLKSRLTISVDTSKNQLSLKLSSVTAADTAVYYCARLHQPPEGDWFDPWGQGTLVTVSS

SEQ ID NO: 7522 - protein, 14 aa, Artificial Sequence
  Synthetic
ARLHQPPEGDWFDP

SEQ ID NO: 7523 - protein, 110 aa, Artificial Sequence
  Synthetic
SYVLTQPPSVSVAPGKTASITCGGNDIGSKSVHWYQQKPGQAPVLVIYYDSDRPSGIPERFSGSNSGNTATLTISRVEGGDEADYYCQVWDSTSDRPLYVFGTGTKVTVL

SEQ ID NO: 7524 - protein, 13 aa, Artificial Sequence
  Synthetic
QVWDSTSDRPLYV

SEQ ID NO: 7525 - protein, 119 aa, Artificial Sequence
  Synthetic
EVQLVQSGAEVKKPGESLKISCRGSGYSFTNYWIGWVRQMPGKGLEWMGIIYPGDSDTRYNPSFQGQVTISADKSISTAYLQWSSLKASDTAMYYCATRGSGNLIFDYWGQGTLVTVSS

SEQ ID NO: 7526 - protein, 12 aa, Artificial Sequence
  Synthetic
ATRGSGNLIFDY

SEQ ID NO: 7527 - protein, 111 aa, Artificial Sequence
  Synthetic
QSVLTQPASVSGSPGQSITISCTGTSSDVGSYNLVSWYQQYPGKAPKLMIYEGSKRPSGISNRFSGSNSGNTASLTISGLQPEDEADYYCCSYAGSTTLWVFGGGTKLTVL

SEQ ID NO: 7528 - protein, 11 aa, Artificial Sequence
  Synthetic
CSYAGSTTLWV

SEQ ID NO: 7529 - protein, 127 aa, Artificial Sequence
  Synthetic
QVQLQESGPGLVKPSETLSLTCTVSGGSVSGGSFYWSWIRRPPGKGLEWIGYIHYSGSANHNPSLKSRVSMSVDTSKNQFSLKLSSVTAADTAVYFCARGLYYYDSGGYLGGDFDSWGQGTLVTVSS

SEQ ID NO: 7530 - protein, 19 aa, Artificial Sequence
  Synthetic
ARGLYYYDSGGYLGGDFDS

SEQ ID NO: 7531 - protein, 116 aa, Artificial Sequence
  Synthetic
QSVLTQSPSASASLGASVTLTCTLSSGYSNYNVDWYQQRPGTGPRFVMRVGTGGIVGSKGYGIPDRFSVLGSGLNRYLTIKNIQEEDESDYHCGADHGSGSNFVVVFGGGTRLTVL

SEQ ID NO: 7532 - protein, 13 aa, Artificial Sequence
  Synthetic
GADHGSGSNFVVV

SEQ ID NO: 7533 - protein, 126 aa, Artificial Sequence
  Synthetic
EVQLVESGGGLVQPGRSLRLSCVASGFTFEDYAMHWVRQVPGKGLEWVSGMSWNSGTIGYADSVKGRFIISRDNAQNSLYLQMRNLRTEDTALYYCAKIPSASYDFGSGHDVFDIWGQGTMVTVSS

SEQ ID NO: 7534 - protein, 19 aa, Artificial Sequence
  Synthetic
AKIPSASYDFGSGHDVFDI

SEQ ID NO: 7535 - protein, 110 aa, Artificial Sequence
  Synthetic
QSVLTQPPSSSGTPGQRVTISCSGSSSNIGSSYVYWFQQLPGTAPKLLIYRNNQRPSGVPDRFSGSKSGTSASLAISGLRSEDEADYYCAAWYDSLSGVVFGGGTKLTVL

SEQ ID NO: 7536 - protein, 11 aa, Artificial Sequence
  Synthetic
AAWYDSLSGVV

SEQ ID NO: 7537 - protein, 124 aa, Artificial Sequence
  Synthetic
QVQLVESGGGVVQPGRSLRLSCAASGFTFSNYGMHLVRQAPGKGLEWVAIISYDGSNKYYADSVKGRFTISRDSSKNTLYLQMNNLRAEDTAVYYCAKDPLPFRDYYYYYMDVWGKGTTVTVSS

SEQ ID NO: 7538 - protein, 17 aa, Artificial Sequence
  Synthetic
AKDPLPFRDYYYYYMDV

SEQ ID NO: 7539 - protein, 111 aa, Artificial Sequence
  Synthetic
QSVLTQPASVSGSPGQSITISCTGTSSDVGGYNYVSWYQQHPGKAPKLMIYDVSNRPSGVSNRFSGSKSGNTASLTISGLQAEDEADYYCSSYTSSSTLGVFGTGTKVTVL

SEQ ID NO: 7540 - protein, 11 aa, Artificial Sequence
  Synthetic
SSYTSSSTLGV

SEQ ID NO: 7541 - protein, 128 aa, Artificial Sequence
  Synthetic
QVQLQESGPGLVKPSQTLSLTCTVSGGSINNGSYYWTWIRQHPGKGLEWIGYIYYTGDTYYNPPLMSRLTVSVDTSKNQLSLKLSSVTAADTAVYYCASLIRAHTFGGVIVNPYFDYWGQGILVTVSS

SEQ ID NO: 7542 - protein, 20 aa, Artificial Sequence
  Synthetic
ASLIRAHTFGGVIVNPYFDY

SEQ ID NO: 7543 - protein, 110 aa, Artificial Sequence
  Synthetic
QSVLTQPPAASGTPGQRVTISCSGSSSNIGRNYVYWYQQLPGMAPKLLIYRNNQRPSGVPDRFSGSKSGPSASLAISGLRSEDEAAYYCAAWDDSLSGVLFGGGTNLAVL

SEQ ID NO: 7544 - protein, 11 aa, Artificial Sequence
  Synthetic
AAWDDSLSGVL

SEQ ID NO: 7545 - protein, 121 aa, Artificial Sequence
  Synthetic
QVQLVESGGGVVQPGRSLRLSCAASGFSFSRYPMSWVRQAPGKGLEWVAVISNDGSNKDYADSVKGRFTVSRDNSKNTVYLQMNSLRPEDTAVFYCAREAPGVVPKLFDSWGQGTLVTVSS

SEQ ID NO: 7546 - protein, 14 aa, Artificial Sequence
  Synthetic
AREAPGVVPKLFDS

SEQ ID NO: 7547 - protein, 108 aa, Artificial Sequence
  Synthetic
SYVLTQPPSVSVAPGRTARITCGGNNIGSKSVHWYQQKPGQAPVLVIYYDSDRPSGIPERFSGSNSGNTATLTISRVEAGDEADYSCQVWDSSADHPVFGGGTKLTVL

SEQ ID NO: 7548 - protein, 11 aa, Artificial Sequence
  Synthetic
QVWDSSADHPV

SEQ ID NO: 7549 - protein, 125 aa, Artificial Sequence; identical to SEQ ID NO: 329
  Synthetic

SEQ ID NO: 7550 - protein, 18 aa, Artificial Sequence
  Synthetic
AKVVVRGVIISLYYGMDV

SEQ ID NO: 7551 - protein, 106 aa, Artificial Sequence
  Synthetic
SYVLTQPPSVSVSPGQTASITCSGDKLGDKSACWYQQKPGQSPVLVIYQDNKRPSGIPERFSGSNSGNTATLTISGTQAMDEADYYCQAWDSSTAVFGGGTKLTVL

SEQ ID NO: 7552 - protein, 9 aa, Artificial Sequence
  Synthetic
QAWDSSTAV

SEQ ID NO: 7553 - protein, 120 aa, Artificial Sequence
  Synthetic
EVQLVQSGAEVKKPGESLKISCQGSGYSFISYWIGWVRHMPGKGLEWMGVIHPGDSDTRYSPSFQGQVTISADKSITTAYLQWSSLKASDTATYYCARLSSVTMGWFDPWGQGTLVSVTT

SEQ ID NO: 7554 - protein, 13 aa, Artificial Sequence
  Synthetic
ARLSSVTMGWFDP

SEQ ID NO: 7555 - protein, 110 aa, Artificial Sequence
  Synthetic
QSVLTQPPSASGPPGQRVTISCSGSSSNIGSNSVSWYHHLPGTAPKLLIFNNNQRPSGVPDRVSGSKSGTSASLAISGLQSEDEADYYCAAWDDSLDGVVFGGGTKLTVL

SEQ ID NO: 7556 - protein, 11 aa, Artificial Sequence
  Synthetic
AAWDDSLDGVV

SEQ ID NO: 7557 - protein, 121 aa, Artificial Sequence
  Synthetic
EVQLLESGGGLVQPGGSLRLSCAASGFTFPIFAMSWVRQAPGKGLKWVSGISGSEGTTYSADSVKGRFTISRDNSKNTLYLQMNSLRAEDTATYYCAKHPDGYISGWYLFWGQGTLVTVSS

SEQ ID NO: 7558 - protein, 14 aa, Artificial Sequence
  Synthetic
AKHPDGYISGWYLF

SEQ ID NO: 7559 - protein, 107 aa, Artificial Sequence
  Synthetic
SYVLTQPPSVSVVPGQTARITCGGNNIGGKSVNWYQQKPGQAPVLVIYYDGDRPSGIPERFSGSNSGNTATLTISRVEAGDEADYYCQVWDASSDPMVFGGGTKVTV

SEQ ID NO: 7560 - protein, 11 aa, Artificial Sequence
  Synthetic
QVWDASSDPMV

SEQ ID NO: 7561 - protein, 126 aa, Artificial Sequence
  Synthetic
  misc_feature (31)..(31): Xaa can be any naturally occurring amino acid
  misc_feature (37)..(37): Xaa can be any naturally occurring amino acid
  misc_feature (39)..(39): Xaa can be any naturally occurring amino acid
  misc_feature (62)..(62): Xaa can be any naturally occurring amino acid
  misc_feature (66)..(66): Xaa can be any naturally occurring amino acid
  misc_feature (70)..(70): Xaa can be any naturally occurring amino acid
EVQLVESGGGLVKPGGSLRLSCAASGFTFSXYSMNWXRXVPGKGVEWVSSSSSSNSYIYEAXSLKXGFTXSRDNAKNSLYLQMNSLRAEDTAVYYCARDPAGYSYGQYYYYYMDVWGKGTTVTVSS

SEQ ID NO: 7562 - protein, 19 aa, Artificial Sequence
  Synthetic
ARDPAGYSYGQYYYYYMDV

SEQ ID NO: 7563 - protein, 111 aa, Artificial Sequence
  Synthetic
QSVLTQPASVSGSPGQSITISCTGTSSDVGAYNYVSWYQHHPGKAPKLMIFDVTNRPSGVSNRFSGSKSGNTASLTISGLQAEDEADYYCSSYTRSSPLYVFGTGTKVTVL

SEQ ID NO: 7564 - protein, 11 aa, Artificial Sequence
  Synthetic
SSYTRSSPLYV

SEQ ID NO: 7565 - protein, 124 aa, Artificial Sequence
  Synthetic
EVQLVESGGGLVQPGRSLRLSCAASGFTFDDYAMHWVRQAPGKGLEWVSGISWNSGTIGYADSVKGRFTISRDNAKNSLSLQMNSLRYEDTALYYCAKDLGYDFRTSYNYYDYWGQGTLVTVSS

SEQ ID NO: 7566 - protein, 17 aa, Artificial Sequence
  Synthetic
AKDLGYDFRTSYNYYDY

SEQ ID NO: 7567 - protein, 110 aa, Artificial Sequence
  Synthetic
QSVLTQPPSVSGAPGQRVTISCTGSSSNIGAGYDVHWYQQLPGTAPKLLIYANNNRPSGVPDRFSGSKSGTSASLAITGLQAEDEADYYCQSYDSSLSQVFGTGTKVTVL

SEQ ID NO: 7568 - protein, 10 aa, Artificial Sequence
  Synthetic
QSYDSSLSQV

SEQ ID NO: 7569 - protein, 123 aa, Artificial Sequence
  Synthetic
QVQLVQSGAEIKKPGASVKVACKASGFTFSGYYIHWVRQAPGQGLEWMGWIIPDSGGANYAQKFQGRVTMTRDTSITTAYMELSSLRSDDTAMYYCARDDSTGYPNPNDAFDIWGQGTLVTVS

SEQ ID NO: 7570 - protein, 17 aa, Artificial Sequence
  Synthetic
ARDDSTGYPNPNDAFDI

SEQ ID NO: 7571 - protein, 111 aa, Artificial Sequence
  Synthetic
QSVLTQPPSVSAAPGQKVTVSCSGSNSNIGNNFVSWYQQLPGTAPKLLIYENNKRPSGIPDRFSGSKSGTSATLVITGLQTGDEADYYCGTWDSSLSVGWVFGGGTRLTVL

SEQ ID NO: 7572 - protein, 12 aa, Artificial Sequence
  Synthetic
GTWDSSLSVGWV

SEQ ID NO: 7573 - protein, 121 aa, Artificial Sequence
  Synthetic
QVQLQESGPGLVKSSQTLSLNCSVFGASISSGGYYWTWIRQHPGKGLEWIGYIHYRGTYYNPSLKSRVTMSVDTSKNQFSLKVRSVSAADTAIYYCARAIVVVTLNWFDLWGQGTLVTVSS

SEQ ID NO: 7574 - protein, 14 aa, Artificial Sequence
  Synthetic
ARAIVVVTLNWFDL

SEQ ID NO: 7575 - protein, 110 aa, Artificial Sequence
  Synthetic
NFMLTQPHSVSESPGKTVTISCSGSGGSIASNYVQWYQQRPGSAPTAVIYEDNQRPSGVPDRFSGSIDSSSNSASLTISGLKTEDEADYYCQSYDTSNPVIFGGGTKLTV

SEQ ID NO: 7576 - protein, 10 aa, Artificial Sequence
  Synthetic
QSYDTSNPVI

SEQ ID NO: 7577 - protein, 123 aa, Artificial Sequence
  Synthetic
  misc_feature (28)..(29): Xaa can be any naturally occurring amino acid
  misc_feature (34)..(34): Xaa can be any naturally occurring amino acid
  misc_feature (48)..(48): Xaa can be any naturally occurring amino acid
QVQLVESGGGVVQPGRSLRLSCAASGKXXSIGAXDGVRRRPGPAWEVXATISCSVRIHFQQVSHVVGPPVSRNNSKNTLYLQMNSLRAEDTAVFYCARDRRQGGTYYADAFDIWGQGTLVTVS

SEQ ID NO: 7578 - protein, 17 aa, Artificial Sequence
  Synthetic
ARDRRQGGTYYADAFDI

SEQ ID NO: 7579 - protein, 110 aa, Artificial Sequence
  Synthetic
SYVLTQPPSVSVAPGKTARITCGGNNIGSKSVHWYQQRPGQAPVLVIYYDSDRPSGIPERFSGSNSGNTATLTISRVEAGDEADYHCQVWGGTNDHGGVLFGGGTKLTVL

SEQ ID NO: 7580 - protein, 13 aa, Artificial Sequence
  Synthetic
QVWGGTNDHGGVL

SEQ ID NO: 7581 - protein, 128 aa, Artificial Sequence
  Synthetic
QVQLVQSGAEVKKPGASVKVSCKASGYTFSDSFIHWVRQAPGQGLEWMGWINPNSGGTNYAQKFRGRVTMTRDTSISTAYMELSRLRSDDTAVYYCARDLTLVATIGPYYYYYGMDVWGQGTTVTVSS

SEQ ID NO: 7582 - protein, 21 aa, Artificial Sequence
  Synthetic
ARDLTLVATIGPYYYYYGMDV

SEQ ID NO: 7583 - protein, 111 aa, Artificial Sequence
  Synthetic
QSVLTQPPSASGTPGQRVTISCSGSSSNIGSNTVIWYQQLPGTAPKLLIYSNNQRPSGVPDRFSGSKSGTSASLAISGLQSEDEADYYCAAWDDSLNGYAVFGGGTQLTVL

SEQ ID NO: 7584 - protein, 12 aa, Artificial Sequence
  Synthetic
AAWDDSLNGYAV

SEQ ID NO: 7585 - protein, 124 aa, Artificial Sequence
  Synthetic
QVQLVESGGGVVQPGRSLRLSCAASGFTFSNYGMHWVRQAPGKGLEWVALISNDGSNKYYEDSLKGRFIISRDNSKNTLYLQMNSLRSEDTAVYYCAKEESYSSSWIPYGMDVWGQGTTVAVSS

SEQ ID NO: 7586 - protein, 17 aa, Artificial Sequence
  Synthetic
AKEESYSSSWIPYGMDV

SEQ ID NO: 7587 - protein, 104 aa, Artificial Sequence
  Synthetic
SYVLTQPPSVSVAPGNTARITCGGNSIGSKNVHWYQQKPGQAPVLVISFDSDRPSGIPERFSGSNSGNTATLTISRVEAGDEADYSCQVWDTTPEFGGGTKLTV

SEQ ID NO: 7588 - protein, 8 aa, Artificial Sequence
  Synthetic
QVWDTTPE

SEQ ID NO: 7589 - protein, 122 aa, Artificial Sequence
  Synthetic
QVQLVQSGAEVKKPGSSVKVSCKASGGTFSSYDINWVRQAPGQGLEWMGGINTISGTANYAQKFQGRVTITADEFTTTVYMELSSLRSEDTAVYYCARDSSSYPVMYYFDYWGQGTPVTVSS

SEQ ID NO: 7590 - protein, 15 aa, Artificial Sequence
  Synthetic
ARDSSSYPVMYYFDY

SEQ ID NO: 7591 - protein, 109 aa, Artificial Sequence
  Synthetic
SYVLTQPPSVSVAPGKTARITCGGNNIGSKNVHWYQQRPGQAPVLVIYYDSDRPSGIPERFSGSNSGNTATLTISRVEAGDEADYYCQVWDSSSDHFVVFGGGTKLTVL

SEQ ID NO: 7592 - protein, 12 aa, Artificial Sequence
  Synthetic
QVWDSSSDHFVV

SEQ ID NO: 7593 - protein, 121 aa, Artificial Sequence
  Synthetic
QVQLVQSGAEVEKPGSSVKVSCKASGDTFSSYVISWVRQAPGQGLEWMGGIIPISDTTTYTQKFQGRVTITADESTSTAYLELSSLRFEDTAVYYCARGAVVATWDYFDYWGQGTLVTVSS

SEQ ID NO: 7594 - protein, 14 aa, Artificial Sequence
  Synthetic
ARGAVVATWDYFDY

SEQ ID NO: 7595 - protein, 110 aa, Artificial Sequence
  Synthetic
SYVLTQPPSVSVAPGKTARITCGGNNIGSKSVHWYQQKPGQAPVLVIYYDSDRPSGIPERFSGSNSGNTATLTISRVEAGDEADFYCQVWDGTSDHPGVVFGGGTKLTVL

SEQ ID NO: 7596 - protein, 13 aa, Artificial Sequence
  Synthetic
QVWDGTSDHPGVV

SEQ ID NO: 7597 - protein, 119 aa, Artificial Sequence
  Synthetic
EVQLVESGGGLVQSGGSLRLSCAATGFTFSSYWMHWVRQAPGKGLVWVSRINSDGSSTSSADFVKGRITISRDNAKNTLYLQMNSLRAEDTAVYYCARVTYYYGAFDVWGQGAKVTVSS

SEQ ID NO: 7598 - protein, 12 aa, Artificial Sequence
  Synthetic
ARVTYYYGAFDV

SEQ ID NO: 7599 - protein, 110 aa, Artificial Sequence
  Synthetic
NFMLTQPHSVSESPGKTVTISCTGSSGSIASNYVQWYQQRPGSAPTTVIYEDNQRPSGVPDRFSGSIDSSSNSASLTISGLKTEDEADYFCQSYDGSTHVFGTGTKVTVL

SEQ ID NO: 7600 - protein, 9 aa, Artificial Sequence
  Synthetic
QSYDGSTHV

SEQ ID NO: 7601 - protein, 128 aa, Artificial Sequence
  Synthetic
EVQLVESGGGLVQPGGSLRISCVASGFTFDDYALHWVRQTPGKGLEWVTGISWNGAIIGTVDSVKGRFIISRDNDKNSLFLQMLRLRVEDTAVYYCVKDIGRGNYALWSGSDWGFDYWGQGTLVTVSP

SEQ ID NO: 7602 - protein, 21 aa, Artificial Sequence
  Synthetic
VKDIGRGNYALWSGSDWGFDY

SEQ ID NO: 7603 - protein, 109 aa, Artificial Sequence
  Synthetic
QSVLTQPPSASGSPGQTVTISCTGTSSDVGGYNYVSWYQQHPGKAPKLIIYEVTKRPSGVPDRFSGSKSGNTASLTVSGLRAEDEADYYCSSYAGTNGVFGTGTKVTVL

SEQ ID NO: 7604 - protein, 9 aa, Artificial Sequence
  Synthetic
SSYAGTNGV

SEQ ID NO: 7605 - protein, 124 aa, Artificial Sequence; identical to SEQ ID NO: 297
  Synthetic

SEQ ID NO: 7606 - protein, 16 aa, Artificial Sequence
  Synthetic
ARAMITFGGVIVLYDY

SEQ ID NO: 7607 - protein, 111 aa, Artificial Sequence
  Synthetic
QSVLTQPPSASGSPGQSVTISCTGTSSDVGGYNYVSWYQQHPGKAPKLMIYEVTKRPSGVPARFSGSKSGNTASLTVSGLQAEDEADYYCSSYAGSILLYVFGTGTKVTVL

SEQ ID NO: 7608 - protein, 11 aa, Artificial Sequence
  Synthetic
SSYAGSILLYV

SEQ ID NO: 7609 - protein, 125 aa, Artificial Sequence; identical to SEQ ID NO: 335
  Synthetic

SEQ ID NO: 7610 - protein, 18 aa, Artificial Sequence
  Synthetic
ARDVIITMGRGVVFRMDV

SEQ ID NO: 7611 - protein, 110 aa, Artificial Sequence; identical to SEQ ID NO: 336
  Synthetic

SEQ ID NO: 7612 - protein, 11 aa, Artificial Sequence
  Synthetic
AAWDDSLNGVV

SEQ ID NO: 7613 - protein, 123 aa, Artificial Sequence
  Synthetic
EVQLVQSGAEVKKPGESLKISCKASGYSFTIYWIGWVRQMPGKGLEWMGIIYPGESETRYSPSFQGQVTISADKSISTAYLQWRSLKASDTAMYYCARGGPPGGVKLELTDYWGQGTLLTVSS

SEQ ID NO: 7614 - protein, 16 aa, Artificial Sequence
  Synthetic
ARGGPPGGVKLELTDY

SEQ ID NO: 7615 - protein, 111 aa, Artificial Sequence; identical to SEQ ID NO: 284
  Synthetic

SEQ ID NO: 7616 - protein, 12 aa, Artificial Sequence
  Synthetic
ASWDDSLNGPVV

SEQ ID NO: 7617 - protein, 132 aa, Artificial Sequence
  Synthetic
QVQLVESGGGVVQPGRSLRLSCAASRFTFSRYVVHWVRQPPGNGLEWVATISNDGDKKHYADSVKGRFTISRDNSKNTLYLQMDSLRVEDTAVYYCARVSSPAYYDVLTGYDTSSHYYGMDVWGQGTTVIVS

SEQ ID NO: 7618 - protein, 26 aa, Artificial Sequence
  Synthetic
ARVSSPAYYDVLTGYDTSSHYYGMDV

SEQ ID NO: 7619 - protein, 110 aa, Artificial Sequence
  Synthetic
QSVLTQPPSVSGAPGQRVTISCTGSSPNIGAGYDVHWYQQLPGTAPKLLIYGNSNRPSGIPDRFSGSKSGTSASLAITGLQAEDEADYFCQSYDSSLRGSVFGPGTKVTV

SEQ ID NO: 7620 - protein, 11 aa, Artificial Sequence
  Synthetic
QSYDSSLRGSV

SEQ ID NO: 7621 - protein, 131 aa, Artificial Sequence
  Synthetic
QVQLVQSGAEVKKPGASVRVSCKASGYTFTDYYMHWVRQAPGQGLEWMGWINPNSGGTSYAQNFQGRVTMTRDTSITTAYMELSRLRSDDTAVYYCSRDPLVTYYYGSGAYYPFQYTDDYWGQGTLVTVSS

SEQ ID NO: 7622 - protein, 24 aa, Artificial Sequence
  Synthetic
SRDPLVTYYYGSGAYYPFQYTDDY

SEQ ID NO: 7623 - protein, 109 aa, Artificial Sequence
  Synthetic
QSVLTQPPSASGSPGQSVTISCTGTSSDVGGYNYVSWYQQHPGKAPKLMIYEVSKRPSGVPDRFSGSKSGNTASLTVSGLQAEDEADYYCSSYAGRNWVFGTGTKVTVL

SEQ ID NO: 7624 - protein, 9 aa, Artificial Sequence
  Synthetic
SSYAGRNWV

SEQ ID NO: 7625 - protein, 124 aa, Artificial Sequence
  Synthetic
EVQLVESGGHLVQPGGSLRLSCAASGFTFSSYWMSWVRQAPGKGLEWVANIKQDGSEQDYVDSVKGRFTISRDNAKNSLYLQMSSLRAEDAAVYYCARDNREYQLLSDYYFDFWGQGTLVTVSS

SEQ ID NO: 7626 - protein, 17 aa, Artificial Sequence
  Synthetic
ARDNREYQLLSDYYFDF

SEQ ID NO: 7627 - protein, 106 aa, Artificial Sequence
  Synthetic
SYVLTQPPSVSVSPGQTARITCSGDALPMQYIYWYQQKLGQAPVLVIYKDSERPSGIPERFSGSSSGTTVTLTITGAQAEDEADYYCQSADSSGTVFGGGTKLTVL

SEQ ID NO: 7628 - protein, 9 aa, Artificial Sequence
  Synthetic
QSADSSGTV

SEQ ID NO: 7629 - protein, 122 aa, Artificial Sequence; identical to SEQ ID NO: 287
  Synthetic

SEQ ID NO: 7630 - protein, 15 aa, Artificial Sequence
  Synthetic
ARGRANYNSKFLLDN

SEQ ID NO: 7631 - protein, 111 aa, Artificial Sequence
  Synthetic
QSVLTQPASVSGSPGQSITISCTGTSSDVGSYNLVSWYQQHPGTAPKLMIYEGSKRPSGVSDRFSGYKSGNTASLTISGLQADDEADYYCCSFAGSTTRYVFGTGTRVTVL

SEQ ID NO: 7632 - protein, 11 aa, Artificial Sequence
  Synthetic
CSFAGSTTRYV

SEQ ID NO: 7633 - protein, 120 aa, Artificial Sequence
  Synthetic
EVQLVQSGTEVRKPGESLKISCKASGYSFNRNWIGWVRQLPGKGLEWMGIIYPDDSDTRYSPSFQGHVTISADKSINTAYLQWSSLKASDTAMYYCTKREGSYPPYFHDWGQGTLVTVFS

SEQ ID NO: 7634 - protein, 13 aa, Artificial Sequence
  Synthetic
TKREGSYPPYFHD

SEQ ID NO: 7635 - protein, 108 aa, Artificial Sequence
  Synthetic
SYVLTQPPSVSVAPGKTARITCGGNNIGSKSVHWYQQKPGQAPMVVTYYDSDRPSGIPERFSGSNSGNTATLTISRVEAGDEADYYCQVWDSNSDHYVFGTGTKVTVL

SEQ ID NO: 7636 - protein, 11 aa, Artificial Sequence
  Synthetic
QVWDSNSDHYV

SEQ ID NO: 7637 - protein, 125 aa, Artificial Sequence
  Synthetic
QVQLVQSGAEVKKPGSSVRVSCTASGGTFSDYAITWVRQAPGQGLEWMGGIIPIFGPAKYAQKFQGRLTITADESTNTYHMELTSLRSDDTAVYYCARGRFRVVLVIIYDAFDIWGQGTMVTVSS

SEQ ID NO: 7638 - protein, 18 aa, Artificial Sequence
  Synthetic
ARGRFRVVLVIIYDAFDI

SEQ ID NO: 7639 - protein, 111 aa, Artificial Sequence
  Synthetic
QSVLTQPPSASGSPGQSVTISCTGTNSDVGAYSYVSWYQLHPGKAPKLIIYEVSNRPSGVPHRFSGSKSGDTASLTVSGLQAEDEADYYCCSIAGHNNPGYVFGTGTTLTV

SEQ ID NO: 7640 - protein, 12 aa, Artificial Sequence
  Synthetic
CSIAGHNNPGYV

SEQ ID NO: 7641 - protein, 122 aa, Artificial Sequence
  Synthetic
QVQLVQSGAEVKKPGASVRVSCKASGYTFTSYDINWVRQATGQGLEWMAWMNPTSGNTGYAQKFQGRVTMTRDTSISTVYMELSSLRSEDTAVYYCARGRANYNSKFLLDSWGQGTLVTVSS

SEQ ID NO: 7642 - protein, 15 aa, Artificial Sequence
  Synthetic
ARGRANYNSKFLLDS

SEQ ID NO: 7643 - protein, 110 aa, Artificial Sequence
  Synthetic
QSVLTQPASVSGSPGQSITISCTGTSSDVGSYNLVSWYQQHPGSAPKLIIYEGSKRPSGVSNRFSGSKSGNTASLTISGLQAEDEADYYCCSYAGSSSRYVFGIGTKVTV

SEQ ID NO: 7644 - protein, 11 aa, Artificial Sequence
  Synthetic
CSYAGSSSRYV

SEQ ID NO: 7645 - protein, 124 aa, Artificial Sequence
  Synthetic
QVQLVQSGAEVKKPGSSVKVSCKASGGTSRSYPISWVRQAPGQGLEWMGRIIPIVGTANYAQRFQGRVTITADESTGTAYMELSSLRSEDTAVYYCARNRGYSDYGSVYYFDYWGQGTLVSVSS

SEQ ID NO: 7646 - protein, 17 aa, Artificial Sequence
  Synthetic
ARNRGYSDYGSVYYFDY

SEQ ID NO: 7647 - protein, 110 aa, Artificial Sequence; identical to SEQ ID NO: 350
  Synthetic

SEQ ID NO: 7648 - protein, 11 aa, Artificial Sequence
  Synthetic
QSYDSSLSGSV

SEQ ID NO: 7649 - protein, 124 aa, Artificial Sequence
  Synthetic
QLQLQESGSGLVKPSQTLSLTCAVSGGSASSGGYSWSWIRQPPGKGLEWIGYIYHSGSTYYNPSLKSRVTISLDRTKKQFSLKLSSVTAADTAVYYCARFCLSGSHYLFAFDIWGPGTMVTVSS

SEQ ID NO: 7650 - protein, 16 aa, Artificial Sequence
  Synthetic
ARFCLSGSHYLFAFDI

SEQ ID NO: 7651 - protein, 109 aa, Artificial Sequence
  Synthetic
QSVLTQPASVSGSPGQSITISCTATSSDVGGYNFVSWYQQYPGKVPKLLIYDVGNRPSGVSNRFSGSKSGNTASLTISGLQAEDEADYYCSSYTNSSTFFGGGTKLTVL

SEQ ID NO: 7652 - protein, 9 aa, Artificial Sequence
  Synthetic
SSYTNSSTF

SEQ ID NO: 7653 - protein, 118 aa, Artificial Sequence; identical to SEQ ID NO: 323
  Synthetic

SEQ ID NO: 7654 - protein, 11 aa, Artificial Sequence
  Synthetic
AKPVDTAMFDS

SEQ ID NO: 7655 - protein, 109 aa, Artificial Sequence
  Synthetic
SYVLTQPPSVSVAPGETARITCGGNNIGHKSVHWYQQQPGQAPVLVIYYDSERPSGIPERFSGSNSGNTATLTISRVEAGDEADYHCQVWDGGNDHLVIFGGGTKLTVL

SEQ ID NO: 7656 - protein, 12 aa, Artificial Sequence
  Synthetic
QVWDGGNDHLVI

SEQ ID NO: 7657 - protein, 125 aa, Artificial Sequence
  Synthetic
EVQLVQSGAEVKKPGESLKLSCKGSGYSFNSFWIGWVRQMPGKGLEWMGIIYPGDSDTTYSPSFQGQVTISADKSISTVYLQWSSLKASDTAMYYCARLHPTFYDILTGYYIDYWGQGALVTVSS

SEQ ID NO: 7658 - protein, 18 aa, Artificial Sequence
  Synthetic
ARLHPTFYDILTGYYIDY

SEQ ID NO: 7659 - protein, 109 aa, Artificial Sequence
  Synthetic
QSVLTQPASVSGSPGQSITISCTGTSNDVGSYNLVSWYQQHPGKVPKLMIHEVSNRPSGVSNRLSGSKSGNTASLTISGLQAEDEADYYCCSYAFNSILFGGGTKLTVL

SEQ ID NO: 7660 - protein, 9 aa, Artificial Sequence
  Synthetic
CSYAFNSIL

SEQ ID NO: 7661 - protein, 123 aa, Artificial Sequence
  Synthetic
QVQLQESGPGLVRPSGTLSLTCAVTGGSISSSDCWSWVRQPPGKGLEWIGEICHGRTSNYNPSLKSPVSISVDKSKNQFSLILSSVTAADKAVYYCARSSRFLPPLPDAFDLWGQGTIVTVSS

SEQ ID NO: 7662 - protein, 16 aa, Artificial Sequence
  Synthetic
ARSSRFLPPLPDAFDL

SEQ ID NO: 7663 - protein, 108 aa, Artificial Sequence; identical to SEQ ID NO: 362
  Synthetic

SEQ ID NO: 7664 - protein, 10 aa, Artificial Sequence
  Synthetic
QSYDTRLSVV

SEQ ID NO: 7665 - protein, 120 aa, Artificial Sequence; identical to SEQ ID NO: 367
  Synthetic

SEQ ID NO: 7666 - protein, 13 aa, Artificial Sequence
  Synthetic
ARDGGRPGDPFDI

SEQ ID NO: 7667 - protein, 109 aa, Artificial Sequence
  Synthetic
QSVLTQPASVSGSPGQSITISCTGTSSDVGGYNYVSWYQQHPGKAPNLMIYDVSDRPSGVSNRFSGSKSGNTASLTISGLQAEDEADYYCNSFTSNSTRVFGTGTKVTV

SEQ ID NO: 7668 - protein, 10 aa, Artificial Sequence
  Synthetic
NSFTSNSTRV

SEQ ID NO: 7669 - protein, 126 aa, Artificial Sequence
  Synthetic
QLQLQESGPGLVKPSETLSLTCTVSGGSVSTSSYYWGWIRQPPGKGLEWIGSIYYSGSTHYNPSLKSRVTISVDTSKNQFSLNLTSVTAADTAVFYCARHESPPWFGSSNEYFQHWGQGTLVFVSS

SEQ ID NO: 7670 - protein, 18 aa, Artificial Sequence
  Synthetic
ARHESPPWFGSSNEYFQH

SEQ ID NO: 7671 - protein, 109 aa, Artificial Sequence
  Synthetic
SYVLTQPPSVSVAPGNTARITCGGSEIGGKSVHWYQQKPGQAPVLVIYYDSDRPSRIPERFSGSNSGNTATLTISRVEAGDEADYYCQVWDSSSSPLWVFGGGTKLTVL

SEQ ID NO: 7672 - protein, 12 aa, Artificial Sequence
  Synthetic
QVWDSSSSPLWV

SEQ ID NO: 7673 - protein, 123 aa, Artificial Sequence
  Synthetic
QVQLQESGPGLVKPSETLSLNCTVSGGSVSSNNNYWSWIRQPPGKGLEWIGYIFYSGSTNYSPSLKSRVTISVDTSNNQFSLNLISVTAADTAVYYCARERVGWELLAYFDSWGQGTLVTVSS

SEQ ID NO: 7674 - protein, 15 aa, Artificial Sequence
  Synthetic
ARERVGWELLAYFDS

SEQ ID NO: 7675 - protein, 111 aa, Artificial Sequence
  Synthetic
QSVLTQPPSASGTPGQRVTISCSGSGSNIGSNTVNWYQHLPGAAPKLLIYSNNQRPTGVPDRFSGSKSGTSASLAISGLQSEDEADYYCAAWDDRLNGHVVFGGGTKLTVL

SEQ ID NO: 7676 - protein, 12 aa, Artificial Sequence
  Synthetic
AAWDDRLNGHVV

SEQ ID NO: 7677 - protein, 122 aa, Artificial Sequence; identical to SEQ ID NO: 277
  Synthetic

SEQ ID NO: 7678 - protein, 14 aa, Artificial Sequence
  Synthetic
ARATVVITLHWFDP

SEQ ID NO: 7679 - protein, 111 aa, Artificial Sequence; identical to SEQ ID NO: 278
  Synthetic

SEQ ID NO: 7680 - protein, 10 aa, Artificial Sequence
  Synthetic
QSYDVGNPVI

SEQ ID NO: 7681 - protein, 120 aa, Artificial Sequence
  Synthetic
QVQLQESGPGLVNPSGTLSLTCAVSGGSISTTNWWNWVRQPPGKGLEWIGEIHHSGNTNYNPSLKSRVTISVDKSKNQFSLKLSSVTAADTAFYYCARDGGRPGDPFDIWGQGTMVTVSS

SEQ ID NO: 7682 - protein, 13 aa, Artificial Sequence
  Synthetic
ARDGGRPGDPFDI

SEQ ID NO: 7683 - protein, 110 aa, Artificial Sequence
  Synthetic
QSVLTQPASVSGSPGQSITISCTGTSSDVGGYNYVSWYQQHPGKAPKLLVYDVSDRPSGVSNRISGSKSGNTASLTISGLQAEDEADYYCNSYTSSSTRVFGTGTKVTVL

SEQ ID NO: 7684 - protein, 10 aa, Artificial Sequence
  Synthetic
NSYTSSSTRV

SEQ ID NO: 7685 - protein, 125 aa, Artificial Sequence
  Synthetic
QVQLVESGGGVVQPGRSLRLSCAASGFSLSRYGMHWVRQAPGKGLEWVAFISNDGSNKYYADSVKGRFTISRDNSKNTLYLQMNSLRAEDTAVYYCAKDSGYYYGSGSYSHFDYWGQGILVTVSS

SEQ ID NO: 7686 - protein, 18 aa, Artificial Sequence
  Synthetic
AKDSGYYYGSGSYSHFDY

SEQ ID NO: 7687 - protein, 111 aa, Artificial Sequence
  Synthetic
QSVLTQPPSVSGAPGQRVTISCTGSSSNIGAGYDVHWYQQLPRTAPKLLIYDNNNRPSGVPDRFSGSKSDTSASLAITGLQAEDEADYYCQSYDSSLSGWVFGGGTKLTVL

SEQ ID NO: 7688 - protein, 11 aa, Artificial Sequence
  Synthetic
QSYDSSLSGWV

SEQ ID NO: 7689 - protein, 122 aa, Artificial Sequence
  Synthetic
QVQLQESGPGLVKPSQTLSLTCTVSGASIRSRDYYWSWIRQHPGKGLEWLGHIYYSGSAYYNPSLKSRVTISADTSKNQFSLRLNSVTAADTAVYYCARATVVITLHWFGPWGQGTLVTVSS

SEQ ID NO: 7690 - protein, 14 aa, Artificial Sequence
  Synthetic
ARATVVITLHWFGP

SEQ ID NO: 7691 - protein, 111 aa, Artificial Sequence
  Synthetic
NFMLTQPHSVSESPGKTVTISCTASSGSIASNYVQWYQQRPGSAPSIVIYEDNQRPSGVPDRFSGSIDGSSNSASLTISGVKTEDEADYFCQSYDASNPVIFGGGTRLTVL

SEQ ID NO: 7692 - protein, 10 aa, Artificial Sequence
  Synthetic
QSYDASNPVI

SEQ ID NO: 7693 - protein, 122 aa, Artificial Sequence; identical to SEQ ID NO: 353
  Synthetic

SEQ ID NO: 7694 - protein, 15 aa, Artificial Sequence
  Synthetic
AKDIGGGSSPPFFDY

SEQ ID NO: 7695 - protein, 108 aa, Artificial Sequence
  Synthetic
SYVLTQAPSVSLAPGKTARITCGENNIGSKSVHWYQQKPGQAPVLVIYYDSDRPSGIPERFSGSNSGNTATLTISRVEAGDEADYYCQVWDSSSDHVMFGGGTKLTVL

SEQ ID NO: 7696 - protein, 11 aa, Artificial Sequence
  Synthetic
QVWDSSSDHVM

SEQ ID NO: 7697 - protein, 117 aa, Artificial Sequence
  Synthetic
EVQLVESGGGLIQPGGSLRLSCAASGFIVSRNYMSWVRQAPGKGLEWVSVLYSGGSTFYADSVKGRFTVSRDNSKNTLYLQMNSLRAEDTAVYYCARDWGEYYFDYWGQGTLVTVSS

SEQ ID NO: 7698 - protein, 11 aa, Artificial Sequence
  Synthetic
ARDWGEYYFDY

SEQ ID NO: 7699 - protein, 111 aa, Artificial Sequence
  Synthetic
QSVLTQPASVSGSPGQSITISCTGTSSDVGGSNYVSWYQQYPGKAPKLMIYDVTNRPSGVSNRFSGSKSGNTASLTISGLQAEDEADYYCSSHTTSGALRVFGGGTKLTVL

SEQ ID NO: 7700 - protein, 11 aa, Artificial Sequence
  Synthetic
SSHTTSGALRV

SEQ ID NO: 7701 - protein, 122 aa, Artificial Sequence; identical to SEQ ID NO: 365
  Synthetic

SEQ ID NO: 7702 - protein, 14 aa, Artificial Sequence
  Synthetic
ARVVRVLPAASVDC

SEQ ID NO: 7703 - protein, 109 aa, Artificial Sequence
  Synthetic
QSVLTQPRSVSGSPGQSVPISCTGTSSDVGGYDYVSWYQQHPGKAPKLIIYDVSERPSGVPDRFSGSKSGNTASLTISGLQAEDEATYYCCSYAGTSVMFGGGTKLTVL

SEQ ID NO: 7704 - protein, 9 aa, Artificial Sequence
  Synthetic
CSYAGTSVM

SEQ ID NO: 7705 - protein, 125 aa, Artificial Sequence
  Synthetic
EVQLVESGGGLVQPGGSLRLSCAASGFTLSSYWMTWVRQASGKGLEWVANIKQDGSEKNYVDSVKGRFTISRDNAKNSLYLEMKSLRVEDTALYYCARDGESSKSYWTPYYFDLWGQGTLVTVSS

SEQ ID NO: 7706 - protein, 18 aa, Artificial Sequence
  Synthetic
ARDGESSKSYWTPYYFDL

SEQ ID NO: 7707 - protein, 104 aa, Artificial Sequence
  Synthetic
SYVLTQPPSVSVAPGKTARITCGGDSIGAKNVHWYQKKAGQAPVVVICYDNDRPSGIPERFSGSNSGNTATLTISRVEVGDEADYFCQVWDVHPVFGGGTKLTV

SEQ ID NO: 7708 - protein, 8 aa, Artificial Sequence
  Synthetic
QVWDVHPV

SEQ ID NO: 7709 - protein, 122 aa, Artificial Sequence
  Synthetic
QVQLQESGPGLVKPSGTLSLTCAVSGGSLTTSSWWSWVRQPPEKGLEWIGEIHHGGSTTYNPSLKSRVTISVDKSKNQLSLKLSSVTAADTAVYYCARASWGYGSGSFLDYWGQGTLVTVSS

SEQ ID NO: 7710 - protein, 15 aa, Artificial Sequence
  Synthetic
ARASWGYGSGSFLDY

SEQ ID NO: 7711 - protein, 111 aa, Artificial Sequence
  Synthetic
QSVLTQPPSASGTPGQRVTISCSGSSSNIGSNTVNWYQHIPGTAPKLLIYNNNQRPSGVPDRVSGSKSGTSASLAISGLQSEDEADYYCAAWDDSLNGRRVFGTGTKVTVL

SEQ ID NO: 7712 - protein, 12 aa, Artificial Sequence
  Synthetic
AAWDDSLNGRRV

SEQ ID NO: 7713 - protein, 128 aa, Artificial Sequence
  Synthetic
QVQLVQSGAEVKKPGASVKVSCKTSGYTFIGYYMHWVRQAPGQGLEWMGLINPNSGDTNNAQKFQGRVTMTRDTSISTVYMELSRLRSDDTAVYYCARDRHYYDSSGYRRTDYYMDVWGKGTTVTVSS

SEQ ID NO: 7714 - protein, 21 aa, Artificial Sequence
  Synthetic
ARDRHYYDSSGYRRTDYYMDV

SEQ ID NO: 7715 - protein, 110 aa, Artificial Sequence
  Synthetic
QSVLTQPPSVSAAPGQKVTISCSGSSSNIGNNYVSWYQQLPGIAPKLLIFENDKRPSGIPDRFSGSKSGTSATLGITGLQTGDEADYYCGTWDSSLGLWVFGGGTKLTVL

SEQ ID NO: 7716 - protein, 11 aa, Artificial Sequence
  Synthetic
GTWDSSLGLWV

SEQ ID NO: 7717 - protein, 125 aa, Artificial Sequence; identical to SEQ ID NO: 331
  Synthetic

SEQ ID NO: 7718 - protein, 18 aa, Artificial Sequence
  Synthetic
AKVALRGVFISLYYGMDV

SEQ ID NO: 7719 - protein, 105 aa, Artificial Sequence
  Synthetic
SYVLTQPPSVSVTPGQTASITCSGDKLGDKYACWFLQKPGQSPLLVIYQDTKRPSGIPDRLSGSKSGNTATLTISGTQAMDEADYYCQTWDSSAVVFGGGTKLTV

SEQ ID NO: 7720 - protein, 9 aa, Artificial Sequence
  Synthetic
QTWDSSAVV

SEQ ID NO: 7721 - protein, 121 aa, Artificial Sequence
  Synthetic
QLQLQESGPGLVKPSETLSLTCTVSGGSISSSNYYWGWVRQPPGKGLEWIGNIYKSGNTHYNPSLKSRVTISVDTSKNQFSLKLSSVTAAETAVYHCTRMVVVITFAHFDFWGQGSFVTVS

SEQ ID NO: 7722 - protein, 14 aa, Artificial Sequence
  Synthetic
TRMVVVITFAHFDF

SEQ ID NO: 7723 - protein, 112 aa, Artificial Sequence
  Synthetic
NFMLTQPHSVSESPGKTVTISCTGSSGSIASNYVQWYQQRPGSAPTTVIYEDNQRPSGVPDRFSGSIDSSSNSASLIISGLKTEDEADYYCQSYDSSTRSWVFGGGTKLTVL

SEQ ID NO: 7724 - protein, 11 aa, Artificial Sequence
  Synthetic
QSYDSSTRSWV

SEQ ID NO: 7725 - protein, 123 aa, Artificial Sequence
  Synthetic
QVQLQESGPGLVKPSQTLSLTCTVSGGSISSGGYYWSWIRQHPGKGLEWIGYIYYSGSTYYNPSLKSRVTISVDTSKNQFSLKLSSVTAADTAVYYCARDVLYYDSSGSFDPWGQGTLVTVSS

SEQ ID NO: 7726 - protein, 15 aa, Artificial Sequence
  Synthetic
ARDVLYYDSSGSFDP

SEQ ID NO: 7727 - protein, 112 aa, Artificial Sequence
  Synthetic
DIVMTQSPLSLPVTPGEPASISCRSSQSLLHSNGYNYLDWYLQKPGQSPQLLIYLGSNRASGVPDRFSGSGSGTDFTLKISRVEAEDVGVYYCMQALQTPQTFGQGTKVEIK

SEQ ID NO: 7728 - protein, 9 aa, Artificial Sequence
  Synthetic
MQALQTPQT

SEQ ID NO: 7729 - protein, 127 aa, Artificial Sequence
  Synthetic
QVQLVQSGAEVKKPGSSVKVSCKASGGTFSSYAISWVRQAPGQGLEWMGGIIPIIGTANYAQKFQGRVTITADESTSTAYMELSSLRSEDTAVYYCARGERYYYDSSGFYITYFDPWGQGTPVTVSS

SEQ ID NO: 7730 - protein, 20 aa, Artificial Sequence
  Synthetic
ARGERYYYDSSGFYITYFDP

SEQ ID NO: 7731 - protein, 107 aa, Artificial Sequence
  Synthetic
DIQMTQSPSSLSASVGDRVTITCRASQSISSYLNWYQQKPGKAPKLLIYGASSLQSGVPSRFSGSGSGTDFTLTISSLQPEDFATYYCQQSYSTPYTFGQGTKLEIK

SEQ ID NO: 7732 - protein, 9 aa, Artificial Sequence
  Synthetic
QQSYSTPYT

SEQ ID NO: 7733 - protein, 123 aa, Artificial Sequence
  Synthetic
QMQLVQSGPEVKKPGTSVKVSCKASGFTFTSSAMQWVRQARGQRLEWIGWIVVGSGNTNYAQKFQERVTITRDMSTSTAYMELSSLRSEDTAVYYCAAPYCSGGSCRDAFDIWGQGTMVTVSS

SEQ ID NO: 7734 - protein, 16 aa, Artificial Sequence
  Synthetic
AAPYCSGGSCRDAFDI

SEQ ID NO: 7735 - protein, 108 aa, Artificial Sequence; identical to SEQ ID NO: 3387
  Synthetic

SEQ ID NO: 7736 - protein, 9 aa, Artificial Sequence
  Synthetic
QQYGSSPWT

SEQ ID NO: 7737 - protein, 117 aa, Artificial Sequence
  Synthetic
EVQLVESGGGLIQPGGSLRLSCAASGFTVSSNYMTWVRQAPGKGLEWVSLIYSGGSTFYADSVKGRFTISRDNSKNTLYLQMNSLRAEDTAVYYCARDLVNFGIDYWGQGTLVTVSS

SEQ ID NO: 7738 - protein, 11 aa, Artificial Sequence
  Synthetic
ARDLVNFGIDY

SEQ ID NO: 7739 - protein, 109 aa, Artificial Sequence
  Synthetic
DIQLTQSPSFLSASVGDRVTITCRASQGISSYLAWYQQKPGKAPKLLIYAASTLQSGVPSRFSGSGSGTEFTLTISSLHPEDFATYYCQQLNSFPRPITFGQGTRLEIK

SEQ ID NO: 7740 - protein, 11 aa, Artificial Sequence
  Synthetic
QQLNSFPRPIT

SEQ ID NO: 7741 - protein, 128 aa, Artificial Sequence
  Synthetic
QVQLQESGPGLVKPSETLSLTCTVSGGSVSSGNYYWSWIRQPPGKGLEWIGYIYYSGSTNYNPSLKSRVTISVDTSKNQFSLKLSSVTAADTAVYYCARDLRYYDSSGYYSGNGMDVWGQGTTVTVSS

SEQ ID NO: 7742 - protein, 20 aa, Artificial Sequence
  Synthetic
ARDLRYYDSSGYYSGNGMDV

SEQ ID NO: 7743 - protein, 107 aa, Artificial Sequence
  Synthetic
DIQMTQSPSSLSASVGDRVTITCQASQDISNYLNWYQQKPGKAPKLLIYDASNLETGVPSRFSGSGSGTDFTFTISSLQPEDIATYYCQQYDNLLYTFGQGTKLEIK

SEQ ID NO: 7744 - protein, 9 aa, Artificial Sequence
  Synthetic
QQYDNLLYT

SEQ ID NO: 7745 - protein, 115 aa, Artificial Sequence
  Synthetic
EVQLVESGGGLIQPGGSLRLSCAASGLTVSSNYMSWVRQAPGKGLEWVSVIYSGGSTYYADSVKGRFTISRDNSKNTLYLQMNSLRAEDTAVYYCARESYGMDVWGQGTTVTVSS

SEQ ID NO: 7746 - protein, 9 aa, Artificial Sequence
  Synthetic
ARESYGMDV

SEQ ID NO: 7747 - protein, 108 aa, Artificial Sequence
  Synthetic
EIVLTQSPGTLSLSPGERATLSCRASQGLSSSYLAWYQQKPGQSPRLLIYGASSRATGIPDRFSGSGSGTDFTLTISRLEPEDFAVYYCQQYGSSPGTFGQGTKLEIK

SEQ ID NO: 7748 - protein, 9 aa, Artificial Sequence
  Synthetic
QQYGSSPGT

SEQ ID NO: 7749 - protein, 119 aa, Artificial Sequence
  Synthetic
QVQLVQSGAEVKKPGASLKVSCKASGYTFTSYYMHWVRQAPGQGLEWMGIINPSGGSTSYAQKFQGRVTMTRDTSTSTVYMEVSSLRSEDTAVYYCARFYDSSGSFDYWGQGTLVTVSS

SEQ ID NO: 7750 - protein, 12 aa, Artificial Sequence
  Synthetic
ARFYDSSGSFDY

SEQ ID NO: 7751 - protein, 108 aa, Artificial Sequence
  Synthetic
DIQMTQSPSSLSASVGDRVTITCRASQGIRNDLGWYQQKPGKAPKRLIYAASSLQSGVPSRFSGSGSGTEFTLTISSLQPEDFATYYCLQHNSYPRLTFGGGTKVEIK

SEQ ID NO: 7752 - protein, 10 aa, Artificial Sequence
  Synthetic
LQHNSYPRLT

SEQ ID NO: 7753 - protein, 123 aa, Artificial Sequence; identical to SEQ ID NO: 7733
  Synthetic

SEQ ID NO: 7754 - protein, 16 aa, Artificial Sequence
  Synthetic
AAPYCSGGSCRDAFDI

SEQ ID NO: 7755 - protein, 108 aa, Artificial Sequence; identical to SEQ ID NO: 3387
  Synthetic

SEQ ID NO: 7756 - protein, 9 aa, Artificial Sequence
  Synthetic
QQYGSSPWT

SEQ ID NO: 7757 - protein, 117 aa, Artificial Sequence
  Synthetic
  misc_feature (58)..(58): Xaa can be any naturally occurring amino acid
EVQLVESGGGLIQPGGSLRLSCAASGFTVSSNYMSWVRQAPGKGLEWVSVIYSGGSTXYADSVKGRFTISRDNSKNTLYLQMNSLRAEDTAVYYCARDLQVRGMDVWGQGTTVTVSS

SEQ ID NO: 7758 - protein, 11 aa, Artificial Sequence
  Synthetic
ARDLQVRGMDV

SEQ ID NO: 7759 - protein, 106 aa, Artificial Sequence
  Synthetic
DIQMTQSPSSLSASVGDRVTITCRASQGISSWLAWYQQKPGKAPKLLIYAASSLQSGVPSRFSGSGSGTDFTLTISSLQPEDFATYYCQQANSFPRFGGGTKVEIK

SEQ ID NO: 7760 - protein, 8 aa, Artificial Sequence
  Synthetic
QQANSFPR

SEQ ID NO: 7761 - protein, 129 aa, Artificial Sequence
  Synthetic
QLQLQESGPGLVKPSETLSLTCTVSGGSISRSNYYWGWIRQPPGKGLEWIGSIYYSGSTYYNPSLKSRVTISVDTSKNQFSLKLSSVTAADTAVYYCARHSAHYYDSSGISHWGYFQHWGQGTLVTVSS

SEQ ID NO: 7762 - protein, 21 aa, Artificial Sequence
  Synthetic
ARHSAHYYDSSGISHWGYFQH

SEQ ID NO: 7763 - protein, 106 aa, Artificial Sequence
  Synthetic
DIQMTQSPSSLSASVGDRVTITCQASQDISNYLNWYQQKPGKAPKLLIYDASNLETGVPSRFSGSGSGTDFTFTISSLQPEDIATYYCQQYDNLPTFGPGTKVDIK

SEQ ID NO: 7764 - protein, 8 aa, Artificial Sequence
  Synthetic
QQYDNLPT

SEQ ID NO: 7765 - protein, 114 aa, Artificial Sequence
  Synthetic
EVQLVESGGGLIQPGGSLRLSCAASGFTVSSNYMSWVRQAPGKGLEWVSVIYSGGSTYYADSVKGRFTISRDNSKNTLYLQMNSLRAEDTAVYYCARVVRDTAWGQGTLVTVSS

SEQ ID NO: 7766 - protein, 8 aa, Artificial Sequence
  Synthetic
ARVVRDTA

SEQ ID NO: 7767 - protein, 108 aa, Artificial Sequence
  Synthetic
DIQMTQSPSSLSASVGDRVTITCQASQDISNYLNWYQQKPGKAPKLLIYDASNLETGVPSRFSGSGSGTDFTFTISSLQPEDIATYYCQQYDNLSSLTFGGGTKVEIK

SEQ ID NO: 7768 - protein, 10 aa, Artificial Sequence
  Synthetic
QQYDNLSSLT

SEQ ID NO: 7769 - protein, 131 aa, Artificial Sequence
  Synthetic
QVQLQQWGAGLLKPSETLSLTCAVYGGSFSGYYWSWIRQPPGKGLEWIGEINHSGSTNYNPSLKSRVTISVDTSKNQFSLKLSSVTAADTAVYYCARMELRDIVVVVAATPASHYNWFDPWGQGTLVTVSS

SEQ ID NO: 7770 - protein, 25 aa, Artificial Sequence
  Synthetic
ARMELRDIVVVVAATPASHYNWFDP

SEQ ID NO: 7771 - protein, 107 aa, Artificial Sequence
  Synthetic
DIQMTQSPSSLSASVGDRVTITCRASQNISSYLNWYQQKPGKAPKLLIYAASSLQSGVPSRFSGSGSGTDFTLTISSLQPEDFATYYCQQTYSTFGTFGQGTKVEIK

SEQ ID NO: 7772 - protein, 9 aa, Artificial Sequence
  Synthetic
QQTYSTFGT

SEQ ID NO: 7773 - protein, 122 aa, Artificial Sequence
  Synthetic
EVQLVESGGGLVQPGGSLRLSCAASGFTVSSNYMSWVRQAPGKGLEWVSVIYSGGSTYYADSVKGRFTISRDNSKNTLYLQMNSLRAEDTAVYYCARVSGYSYGYSGTFGYWGQGTLVTVSS

SEQ ID NO: 7774 - protein, 16 aa, Artificial Sequence
  Synthetic
ARVSGYSYGYSGTFGY

SEQ ID NO: 7775 - protein, 108 aa, Artificial Sequence
  Synthetic
EIVMTQSPATLSVSPGERATLSCRASQSVSSNLAWYQQKPGQAPRLLIYGASTRATGIPARFSGSGSGTEFTLTISSLQSEDFAVYYCQQYNNWPPWTFGQGTKVEIK

SEQ ID NO: 7776 - protein, 10 aa, Artificial Sequence [sequence omitted]

SEQ ID NO: 7777 - protein, 128 aa, Artificial Sequence
  Synthetic
EVQLVESGGGLVQPGRSLRLSCAASGFTFDDYAMHWVRQVPGKGLEWVSGISWNSGTIGYVDSVRGRFTISRDNAKNSLYLQMNSLRPADTAFYYCTKGRRHDRSDYYNRRPDAFDIWGQGTMVGVSS

SEQ ID NO: 7778 - protein, 21 aa, Artificial Sequence
  Synthetic
TKGRRHDRSDYYNRRPDAFDI

SEQ ID NO: 7779 - protein, 107 aa, Artificial Sequence
  Synthetic
EIVMTQSPATLSVSPGERATLSCRASQSVSSNLAWYQQKPGQAPRLLIYGASTRATGIPARFSGSGSRTEFTLTISSLQSEDFAVYYCQQYNDWPQAFGQGTKVEIK

SEQ ID NO: 7780 - protein, 9 aa, Artificial Sequence
  Synthetic
QQYNDWPQA

SEQ ID NO: 7781 - protein, 114 aa, Artificial Sequence; identical to SEQ ID NO: 7765
  Synthetic

SEQ ID NO: 7782 - protein, 8 aa, Artificial Sequence
  Synthetic
ARVVRDTA

SEQ ID NO: 7783 - protein, 108 aa, Artificial Sequence; identical to SEQ ID NO: 7767
  Synthetic

SEQ ID NO: 7784 - protein, 10 aa, Artificial Sequence
  Synthetic
QQYDNLSSLT

SEQ ID NO: 7785 - protein, 115 aa, Artificial Sequence
  Synthetic
EVQLVESGGGLIQPGGSLRLSCAASGVTVSSNYMNWVRQAPGKGLEWVSVIYSGGSTYYADSVKGRFTISRDNSKNTLYLQMNSLRAEDTAVYYCARESYGMDVWGQGTTVTVSS

SEQ ID NO: 7786 - protein, 9 aa, Artificial Sequence
  Synthetic
ARESYGMDV

SEQ ID NO: 7787 - protein, 108 aa, Artificial Sequence
  Synthetic
EIVLTQSPGTLSLSPGERATLSCRASQSVSSSYLAWYQQKPGQAPRLLIYGASSRATGIPDRFSGSGSGTDFTLTISRLEPEDFAVYYCQQYGSSPGTFGQGTKLEIK

SEQ ID NO: 7788 - protein, 9 aa, Artificial Sequence
  Synthetic
QQYGSSPGT

SEQ ID NO: 7789 - protein, 114 aa, Artificial Sequence; identical to SEQ ID NO: 7765
  Synthetic

SEQ ID NO: 7790 - protein, 8 aa, Artificial Sequence
  Synthetic
ARVVRDTA

SEQ ID NO: 7791 - protein, 108 aa, Artificial Sequence; identical to SEQ ID NO: 7767
  Synthetic

SEQ ID NO: 7792 - protein, 10 aa, Artificial Sequence
  Synthetic
QQYDNLSSLT

SEQ ID NO: 7793 - protein, 119 aa, Artificial Sequence
  Synthetic
QVQLVESGGGLVKPGGSLRLSCAASGFTFSDYYMSWIRQAPGKGLEWVSYISNSDSTIYYADSVKGRFTISRDNAKNSLYLQMNSLRAEDTAVYYCARDGVVPPRWDYWGQGTLVTVSS

SEQ ID NO: 7794 - protein, 12 aa, Artificial Sequence
  Synthetic
ARDGVVPPRWDY

SEQ ID NO: 7795 - protein, 107 aa, Artificial Sequence
  Synthetic
  misc_feature (9)..(10): Xaa can be any naturally occurring amino acid
DIQMTQSPXXLSASVGDRVTITCQASQDISNYLNWFQQKPGKAPKLLIYDASNLETGVPSRFSGSGSGTDFTFTISSLQPEDIATYYCQQYDNLPLAFGGGTKVEIK

SEQ ID NO: 7796 - protein, 9 aa, Artificial Sequence
  Synthetic
QQYDNLPLA

SEQ ID NO: 7797 - protein, 116 aa, Artificial Sequence
  Synthetic
EVQLVESGGGLIQPGGSLRLSCAASGFTVSSNYMSWVRQAPGKGLEWVSLIYSGGSTYYADSVKGRFTISRDNSKNTLYLQMNSLRAEDTAVYYCARMVTYAFDIWGQGTMVTVSS

SEQ ID NO: 7798 - protein, 10 aa, Artificial Sequence
  Synthetic
ARMVTYAFDI

SEQ ID NO: 7799 - protein, 108 aa, Artificial Sequence
  Synthetic
DIQMTQSPVSLSASVGDRVTITCRASQSISSWLAWYQQKPGKAPKLLIYKASSLESGVPSRFSGSGSGTEFTLTISSLQPDDFATYYCQQYNSYSEITFGGGTKVEIK

SEQ ID NO: 7800 - protein, 10 aa, Artificial Sequence
  Synthetic
QQYNSYSEIT

SEQ ID NO: 7801 - protein, 114 aa, Artificial Sequence; identical to SEQ ID NO: 7765
  Synthetic

SEQ ID NO: 7802 - protein, 8 aa, Artificial Sequence
  Synthetic
ARVVRDTA

SEQ ID NO: 7803 - protein, 108 aa, Artificial Sequence; identical to SEQ ID NO: 7767
  Synthetic

SEQ ID NO: 7804 - protein, 10 aa, Artificial Sequence
  Synthetic
QQYDNLSSLT

SEQ ID NO: 7805 - protein, 122 aa, Artificial Sequence
  Synthetic
QVQLVESGGGVVQPGRSLRLSCAASGFTFSSYGMHWVRQAPGKGLEWVAVIWHDGSNKYYADSVKGRFTISRDNSKNTLYLQMNSLRAEDTAVYYCARGDSSGWYPLGMDVWGQGTTVTVSS

SEQ ID NO: 7806 - protein, 15 aa, Artificial Sequence
  Synthetic
ARGDSSGWYPLGMDV

SEQ ID NO: 7807 - protein, 112 aa, Artificial Sequence; identical to SEQ ID NO: 7727
  Synthetic

SEQ ID NO: 7808 - protein, 9 aa, Artificial Sequence
  Synthetic
MQALQTPQT

SEQ ID NO: 7809 - protein, 114 aa, Artificial Sequence; identical to SEQ ID NO: 7765
  Synthetic

SEQ ID NO: 7810 - protein, 8 aa, Artificial Sequence
  Synthetic
ARVVRDTA

SEQ ID NO: 7811 - protein, 108 aa, Artificial Sequence; identical to SEQ ID NO: 7767
  Synthetic

SEQ ID NO: 7812 - protein, 10 aa, Artificial Sequence
  Synthetic
QQYDNLSSLT

SEQ ID NO: 7813 - protein, 123 aa, Artificial Sequence
  Synthetic
QVQLQQWGAGLLKPSETLSRTCAVYGGSFSGYYWNWVRQSPGKGLEWIGEINHRGSTNYNPSLKSRVTISVDTSKNQFSLNLSSVTAADTAIYYCARVRRSSGAGTYWYFDLWGRGTLVTVSS

SEQ ID NO: 7814 - protein, 17 aa, Artificial Sequence
  Synthetic
ARVRRSSGAGTYWYFDL

SEQ ID NO: 7815 - protein, 107 aa, Artificial Sequence
  Synthetic
DIQLTQSPSFLSASVGDRVTITCRASQGIGSYLAWYQQTPENAPKLLIYAASTLQSGVPSRFSGSGSGTEFTLTISSLQPEDFATYYCQQLIGYPRTFGQGTKVEIK

SEQ ID NO: 7816 - protein, 9 aa, Artificial Sequence
  Synthetic
QQLIGYPRT

SEQ ID NO: 7817 - protein, 122 aa, Artificial Sequence
  Synthetic
QVQLVESGGGVVQPGRSLRLSCAASGFTFSSYGMHWVRQAPGKGLEWVAVISYDGSNKYYADSVKGRFTISRDNSKNTLYLQMNSLRAEDTAVYYCAKGGQYYDSSGYGVYWGQGTLVTVSS

SEQ ID NO: 7818 - protein, 15 aa, Artificial Sequence
  Synthetic
AKGGQYYDSSGYGVY

SEQ ID NO: 7819 - protein, 107 aa, Artificial Sequence
  Synthetic
DIQMTQSPSSLSASVGDRVTITCQASQDISNYLNWYQQKPGKAPKLLIYDASNLETGVPSRFSGSGSGTDFTFTISSLQPEDIATYYCQQYENLFLTFGGGTKVEIK

SEQ ID NO: 7820 - protein, 9 aa, Artificial Sequence
  Synthetic
QQYENLFLT

SEQ ID NO: 7821 - protein, 131 aa, Artificial Sequence
  Synthetic
QVQLQESGPGLVKPSETLSLTCTVSGGSVSSGSYYWSWIRQPPGKGLEWIGYIYYSGSTNYNPSLKSRVTISVDTSKNQFSLKLSSVTAADTAVYYCARETLSERITMIVVVPIDRYFDLWGRGTLVTVSS

SEQ ID NO: 7822 - protein, 23 aa, Artificial Sequence
  Synthetic
ARETLSERITMIVVVPIDRYFDL

SEQ ID NO: 7823 - protein, 107 aa, Artificial Sequence
  Synthetic
EIVMTQSPATLSVSPGERATLSCRASQSVSSNLAWYQQKPGQAPRLLIYGASTRATGIPARFSGSGSGTEFTLTISSLQSEDFAVYYCQQYNNWPQTFGQGTKLEIK

SEQ ID NO: 7824 - protein, 9 aa, Artificial Sequence
  Synthetic
QQYNNWPQT

SEQ ID NO: 7825 - protein, 126 aa, Artificial Sequence
  Synthetic
QVQLVQSGAEVKKPGASVKVSCKVSGYILTELSMHWVRQAPGKGLEWMGGFDPEDGETIYAQKFQGRVTMTEDTSTDTAYMELSSLRSEDTAVYYCATVVPGYSSSWYYYYGMDVWGQGTTVTVSS

SEQ ID NO: 7826 - protein, 19 aa, Artificial Sequence
  Synthetic
ATVVPGYSSSWYYYYGMDV

SEQ ID NO: 7827 - protein, 110 aa, Artificial Sequence
  Synthetic
EIVLTQSPGTLSLSPGERATLSCRASQSVSSSYLAWYQQKPGQAPRLLIYGAFSRATGIPDRFSGSGSGTDFTLTISRLEPEDFAVYYCQQYGSSPPRLTFGGGTKVEIK

SEQ ID NO: 7828 - protein, 11 aa, Artificial Sequence
  Synthetic
QQYGSSPPRLT

SEQ ID NO: 7829 - protein, 118 aa, Artificial Sequence
  Synthetic
EVQLVESGGGLVQPGGSLKLSCAASGFSVSTNYMNWVRQAPGKGLEWVSVFYSGGSTYYADSVKGRFTISRDNSKNTLYLQMNSLRGDDTAVYYCARGRSGSDAFDIWGQGTMATVSS

SEQ ID NO: 7830 - protein, 12 aa, Artificial Sequence
  Synthetic
ARGRSGSDAFDI

SEQ ID NO: 7831 - protein, 109 aa, Artificial Sequence
  Synthetic
  misc_feature (15)..(16): Xaa can be any naturally occurring amino acid
EIVLTQSPATLSLSXXERATLSCRASQSVRDYLAWYQQKPGQAPRLLIYDTSNRATGIPARFSGSGSGTDFTLTISSLEPEDFAVYYCQQRSNWPPRYTFGQGTKLEIK

SEQ ID NO: 7832 - protein, 11 aa, Artificial Sequence
  Synthetic
QQRSNWPPRYT

SEQ ID NO: 7833 - protein, 135 aa, Artificial Sequence
  Synthetic
EVQLVESGGGSVQPGGSLRLSCAASGFTFSSYAIHWVRQAPGKGLEYVSAISGNGGSTYYANSVKGRFTISRDNSKNTLYLQMGSLRAEDMAVYYCARGRVRWGYYDSSGYEYVEPIYYYGLDVWGQGTTVTVSS

SEQ ID NO: 7834 - protein, 28 aa, Artificial Sequence
  Synthetic
ARGRVRWGYYDSSGYEYVEPIYYYGLDV

SEQ ID NO: 7835 - protein, 113 aa, Artificial Sequence
  Synthetic
DIVMTQSPVSLPVTPGEPASISCRSSQSLQHSNGYNYLDWYLQKPGQSPQLLIYLGSNRASGVPDRFTGSGSGTDFTLKISRVEAEDVGVYYCMQALQTPPCTFGQGTKLEIK

SEQ ID NO: 7836 - protein, 10 aa, Artificial Sequence
  Synthetic
MQALQTPPCT

SEQ ID NO: 7837 - protein, 122 aa, Artificial Sequence
  Synthetic
EVQLVESGGGFVQPGGSLRLSCAASGFTFSLYWMTWVRQAPGKGLEWVANIEQDGGDKYYVDSVKGRFTISRDNDNNSLSLQMNSLRAEDTAVYYCARGRRDAYNFGGLDVWGQGTTVIVSS

SEQ ID NO: 7838 - protein, 15 aa, Artificial Sequence
  Synthetic
ARGRRDAYNFGGLDV

SEQ ID NO: 7839 - protein, 112 aa, Artificial Sequence
  Synthetic
DIVMTQSPLSLPVTPGEPASISCKSSQSLLHSNGYNYLDWYLQKPGQSPQLLIYLGSNRASGVPDRFSGSGSGTDFTLKISRVEAEDVGVYYCMQALQTPDTFGQGTKLEIK

SEQ ID NO: 7840 - protein, 9 aa, Artificial Sequence
  Synthetic
MQALQTPDT

SEQ ID NO: 7841 - protein, 121 aa, Artificial Sequence
  Synthetic
QVQLVQSGAEVKKPGASVKVSCKASGYTFTDYYLHWVRQAPGQGLEWMGWIIPNTGGTNFAQKFQGRVTMTGDTSITTAYMELSRLRSDDTAVYYCARDKNLGSDDAFDVWGQGTLVTVSS

SEQ ID NO: 7842 - protein, 14 aa, Artificial Sequence
  Synthetic
ARDKNLGSDDAFDV

SEQ ID NO: 7843 - protein, 113 aa, Artificial Sequence
  Synthetic
  misc_feature (15)..(15): Xaa can be any naturally occurring amino acid
DIVMTQSPDSLAVSXGERATINCKSSQTVLYSPNNKNCLAWYQQKPGQPPKLLIYWASTRESGVPDRFSGSGSGTDFTLTISSLQAEDVAVYYCHQYYTTPYTFGQGTKLEIK

SEQ ID NO: 7844 - protein, 9 aa, Artificial Sequence
  Synthetic
HQYYTTPYT

SEQ ID NO: 7845 - protein, 117 aa, Artificial Sequence
  Synthetic
EVQLVESGGGLIQPGGSLRLSCAASGVTVSSNYMTWVRQAPGKGLEWVSLIYSGGSTFYADSVKGRFTISRDNSKNMLYLQMNSLRAEDTAVYYCARDLSEYGMDVWGQGTTVTVSS

SEQ ID NO: 7846 - protein, 11 aa, Artificial Sequence
  Synthetic
ARDLSEYGMDV

SEQ ID NO: 7847 - protein, 107 aa, Artificial Sequence
  Synthetic
DIQLTQSPSFLSASVGDRVSITCRASQGISSYLAWYQQKPGKAPKLLIYGASTLQSGVPSRFSGSGSGTEFTLTISSLQPEDFATYYCQQLNTYVFTFGPGTKVDIK

SEQ ID NO: 7848 - protein, 9 aa, Artificial Sequence
  Synthetic
QQLNTYVFT

SEQ ID NO: 7849 - protein, 127 aa, Artificial Sequence
  Synthetic
EVQLVESGGGLVQPGGSLRLSCAASGFTFSSYWMSWVRQTPGKGLEWVANIKQDGSEKYYVDSVKGRFTISRDNAKNSLNLQMNSLRAEDTAVYYCARAPDIILVAAAVPVFGFDYWGQGTLVTVSS

SEQ ID NO: 7850 - protein, 20 aa, Artificial Sequence
  Synthetic
ARAPDIILVAAAVPVFGFDY

SEQ ID NO: 7851 - protein, 113 aa, Artificial Sequence
  Synthetic
DIVMTQTPLSSPVTLGQPASISCRSSQSLVHSDGNTYLSWLQQRPGQPPRLLIYKISNRFSGVPDRFSGSGAGTDFTLKISRVEAEDVGVYYCMQPTQFPPGTFGQGTKLEIK

SEQ ID NO: 7852 - protein, 10 aa, Artificial Sequence
  Synthetic
MQPTQFPPGT

SEQ ID NO: 7853 - protein, 129 aa, Artificial Sequence
  Synthetic
QLQLQESGPGLVKPSETLSLTCTVSGGSVSSTNFYWGWIRQPPGEGLEWIGSICYSGGTYYNASLKSRVTTSVDTSKNQFYLKLSSVTAADTAVYYCARHSAHYYDRSGKFHWGYLHRWGQGTLVTVSS

SEQ ID NO: 7854 - protein, 21 aa, Artificial Sequence
  Synthetic
ARHSAHYYDRSGKFHWGYLHR

SEQ ID NO: 7855 - protein, 106 aa, Artificial Sequence
  Synthetic
DIQMTQSPSSLSASVGDRVTITCQASQDISNYLTWYQQKPGKAPKLLISEASNLETGVPSRFSGSGSGTDFNFTISSLQPEDTATYYCQEYDNLSTFGPGTKVDIK

SEQ ID NO: 7856 - protein, 8 aa, Artificial Sequence
  Synthetic
QEYDNLST

SEQ ID NO: 7857 - protein, 117 aa, Artificial Sequence
  Synthetic
EVQLVESGGGLVQPGGSLRLSCAASGVIVSNNYMSWVRQAPGKGLEWVSIIYSGGTTHYAYSVNGRFTISRDNSKNTLYLQMNSLTADDTAVYYCARDLVVRGFDIWGQGTMVTVSS

SEQ ID NO: 7858 - protein, 11 aa, Artificial Sequence
  Synthetic
ARDLVVRGFDI

SEQ ID NO: 7859 - protein, 107 aa, Artificial Sequence
  Synthetic
DIQLTQSPSFLSASLGDRVTITCRASQGISTYLAWYQQRPGKAPKLLIYAASTLQSGVPSRFSGSGSGTEFTLTISSLQPEDFATYYCQQLDNYPPPFGQGTRLEIK

SEQ ID NO: 7860 - protein, 9 aa, Artificial Sequence
  Synthetic
QQLDNYPPP

SEQ ID NO: 7861 - protein, 125 aa, Artificial Sequence
  Synthetic
QVQLVQSGAEVKKPGDSVKVSCKTSGYIFTAYYMHWVRQAPGQGLEWMGWIDPISGGTNFARKFQGRVTMTRDTSINTVYMEMTRLRSDDTAVYYCARDISEGTWATGTDAFDIWGQGTMVTVSS

SEQ ID NO: 7862 - protein, 18 aa, Artificial Sequence
  Synthetic
ARDISEGTWATGTDAFDI

SEQ ID NO: 7863 - protein, 106 aa, Artificial Sequence
  Synthetic
EIVMTQSPATLSVSPGERATLSCRASQSVSNNLAWYQQKPGQAPRLLIYGASTRATGIPARFSGSGSGTEFTLTISSLQSEDSAVYYCQQYNNWWTFGQGTKVEIK

SEQ ID NO: 7864 - protein, 8 aa, Artificial Sequence
  Synthetic
QQYNNWWT

SEQ ID NO: 7865 - protein, 117 aa, Artificial Sequence
  Synthetic
EVQLVESGGGLVQPGGSLRLSCAASGVIVSSNYMSWVRQAPGKGLEWVSVIYSGGSTYYGDAVNGRFTISRDSSKNTLYLQMNSLRSEDTAVYYCARDLVVRGFDIWGQGTMVTVSS

SEQ ID NO: 7866 - protein, 11 aa, Artificial Sequence
  Synthetic
ARDLVVRGFDI

SEQ ID NO: 7867 - protein, 107 aa, Artificial Sequence
  Synthetic
DIQLTQSPSFLSASVGDRVTITCRASQGISSDLAWYQQKPGKAPKLLIYAASTLQSGVPSRFSGSGSGTDFTLTISSLQPEDFATYYCQQLNNFPPPFGQGTRLEIK

SEQ ID NO: 7868 - protein, 9 aa, Artificial Sequence
  Synthetic
QQLNNFPPP

SEQ ID NO: 7869 - protein, 125 aa, Artificial Sequence
  Synthetic
QVQLVQSGAEVKKPGASVKVSCKASGYTFTDYYMHWVRQAPGQGLEWMGWINPNSGGTNFAQKFRGRVTMTRDTSISTAYMELSRLRSDDTAVYYCARDLSEGTWATGADPLDIWGQGTMVTVSS

SEQ ID NO: 7870 - protein, 18 aa, Artificial Sequence
  Synthetic
ARDLSEGTWATGADPLDI

SEQ ID NO: 7871 - protein, 106 aa, Artificial Sequence
  Synthetic
EIVMTQSPATLSVSPGERATLSCRASQSVSNNLAWYQQTPGQAPRLLIYRASTRATGVPARFSGSGSGTEFTLTISSLQSEDFAVYYCQQYNNWWTFGQGTKVEIK

SEQ ID NO: 7872 - protein, 8 aa, Artificial Sequence
  Synthetic
QQYNNWWT

SEQ ID NO: 7873 - protein, 122 aa, Artificial Sequence
  Synthetic
QVQLQESGPGLVKPSETLSLTCTVSGASISSYHWTWIRQPPGKGLEWIGHIYYSGSTNYNPSLKSRVTISLDTSSNQFSLKLSSVTAADTAVYYCATDYFDSYHYYYGMDVWGQGTTVIVSS

SEQ ID NO: 7874 - protein, 16 aa, Artificial Sequence
  Synthetic
ATDYFDSYHYYYGMDV

SEQ ID NO: 7875 - protein, 107 aa, Artificial Sequence
  Synthetic
DIQMTQSPSSVSASVGDRVTITCRASQGISGWLAWYQQKPGKAPNLLIYAASTLQSGVPSRFSGSGSGTDFTLTISNLQPEDFATYYCQQANSFPYTFGQGTKLQIK

SEQ ID NO: 7876 - protein, 9 aa, Artificial Sequence
  Synthetic
QQANSFPYT

SEQ ID NO: 7877 - protein, 120 aa, Artificial Sequence
  Synthetic
EVQLLESGGGLVQPGGSLRLSCAASGFTFRSYAMSWVRQAPGGGLEWVSGISGSGGGTEYADSVRGRFTISRDNSKNTLYLQMDSLRAEDTAVYYCAKLPPSSAVAPDYWGQGTLVTVSS

SEQ ID NO: 7878 - protein, 13 aa, Artificial Sequence
  Synthetic
AKLPPSSAVAPDY

SEQ ID NO: 7879 - protein, 106 aa, Artificial Sequence
  Synthetic
DIQMTQSPSSLSASVGDRVTITCRASQGITNDLGWYQQKPGKAPKRLIYAASSLQSGVPSRFSGSGSGTEFTLTISSLQPEDFGTYYCLQHYSWWAFGQGTKVEIK

SEQ ID NO: 7880 - protein, 8 aa, Artificial Sequence
  Synthetic
LQHYSWWA

SEQ ID NO: 7881 - protein, 119 aa, Artificial Sequence
  Synthetic
EVQLVESGGGLVQPGRSLRLSCAASGFTFDDFAMHWVRQAPGKGLEWVSTISWNTDTIAYADSVKGRFTISRDNAKNSLFLQMKSLRAEDTALYYCAKSRRSGGGFDYWGQGTLVTVSS

SEQ ID NO: 7882 - protein, 12 aa, Artificial Sequence
  Synthetic
AKSRRSGGGFDY

SEQ ID NO: 7883 - protein, 107 aa, Artificial Sequence
  Synthetic
DIQLTQSPSFLSASVGDRVTITCRASQGISSYLAWYQQKPGKAPKLLIFAASTLQSGVPSRFSGSGSGTEFTLTISSLQPEDFATYYCQQLNNYPLTFGGGTKVEIK

SEQ ID NO: 7884 - protein, 9 aa, Artificial Sequence
  Synthetic
QQLNNYPLT

SEQ ID NO: 7885 - protein, 117 aa, Artificial Sequence
  Synthetic
EVQLVESGGGLIQPGGSLRLSCAASGLTVSSNYMYWVRQAPGKGLEWVSLIYSGGSTFYADSVKGRFTISRDNSKNTLFLQMNSLRAEDTAVYYCARDLGPYGMDVWGQGTTVTVSS

SEQ ID NO: 7886 - protein, 11 aa, Artificial Sequence
  Synthetic
ARDLGPYGMDV

SEQ ID NO: 7887 - protein, 108 aa, Artificial Sequence
  Synthetic
DIQLTQSPSFLSASVGDRVTITCRASQGISSYLAWYQQKPGKAPKLLIYAASTLQSGVPSRFSGSGSGTEFTLTISSLQPEDFATYYCQQLNSYLSLTFGGGTKVEIK

SEQ ID NO: 7888 - protein, 10 aa, Artificial Sequence
  Synthetic
QQLNSYLSLT

SEQ ID NO: 7889 - protein, 129 aa, Artificial Sequence
  Synthetic
QVQLVQSGAEVKKPGSSVRVSCKASGGSFRNFAINWVRQAPGQGLEWMGGIISLFGTTNYTQRFQGRLTISADESTTTAYMELSSLRSEDTAVYYCARGSANYYDRHGHYYVASFLANWGQGTLVTVSS

SEQ ID NO: 7890 - protein, 22 aa, Artificial Sequence
  Synthetic
ARGSANYYDRHGHYYVASFLAN

SEQ ID NO: 7891 - protein, 107 aa, Artificial Sequence
  Synthetic
DIQMTQSPSSLSASVGDRVTITCQASQDISNYLNWYQQKPGKAPKLLIYDASNLETGVPSRFSGSGSGTDFTFTISSLQPEDIATYYCQQYDNLWLTFGGGTKVEIK

SEQ ID NO: 7892 - protein, 9 aa, Artificial Sequence
  Synthetic
QQYDNLWLT

SEQ ID NO: 7893 - protein, 117 aa, Artificial Sequence
  Synthetic
EVQLVESGGGLIQPGGSLRLSCAASGFTVSSNYMNWVRQAPGKGLEWVSVIYSGGTIFYADSVQGRFTISRDNSKNTLFLQMNSLRVEDTAVYYCARDLVVRGMDVWGQGTTVTVSS

SEQ ID NO: 7894 - protein, 11 aa, Artificial Sequence
  Synthetic
ARDLVVRGMDV

SEQ ID NO: 7895 - protein, 107 aa, Artificial Sequence
  Synthetic
DIQLTQSPSFLSASVGDRVTITCRASQGISNYLAWYQQKPGKAPKLLIYGASTLQSGVPSRFSGSGSGTEFTLTISSLQPEDFVTYYCQQLNSDLGTFGPGTKVDIK

SEQ ID NO: 7896 - protein, 9 aa, Artificial Sequence
  Synthetic
QQLNSDLGT

SEQ ID NO: 7897 - protein, 118 aa, Artificial Sequence
  Synthetic
EVQLVESGGGLIQPGGSLRLSCAASGVIVSRNYMSWVRQAPGKGLEWVSVIYSGNTTYYADSVKGRFTISRDNSKNTLYLQMNSLRAEDTAVYYCARGLAAAVSGDYWGRGTLVTVSS

SEQ ID NO: 7898 - protein, 12 aa, Artificial Sequence
  Synthetic
ARGLAAAVSGDY

SEQ ID NO: 7899 - protein, 107 aa, Artificial Sequence
  Synthetic
DIQMTQSPSTLSASVGDRVTITCRASQSFSTWLAWYQQKPGKAPKLLIFKASILESGVPSRFSGSGSGTEFTLTISSLQPDDFATYYCQQYNSYPLTFGGGTKVEIK

SEQ ID NO: 7900 - protein, 9 aa, Artificial Sequence
  Synthetic
QQYNSYPLT

SEQ ID NO: 7901 - protein, 126 aa, Artificial Sequence
  Synthetic
EVQLLESGGDLVQPGGSLRLSCSASGFAFSTYAMNWVRQAPGKGLQWVSSISGSGDSTYYADSVKGRFTISRDNSKNTLSLQMNSLRAEDTALYYCAKVKLRSQVGVVTAPLFDYWGQGTLVTVSS

SEQ ID NO: 7902 - protein, 19 aa, Artificial Sequence
  Synthetic
AKVKLRSQVGVVTAPLFDY

SEQ ID NO: 7903 - protein, 114 aa, Artificial Sequence
  Synthetic
  misc_feature (15)..(15): Xaa can be any naturally occurring amino acid
DIVMTQSPDSLAVSXGERATINCKSSQSVLSSSNNKNYLAWYQHKPGQPPKLLIYWASTRESGVPDRFSGSGSGTDFTLTISSLQAEDVAAYYCQQYYSSSTWTFGQGTKVEIK

SEQ ID NO: 7904 - protein, 10 aa, Artificial Sequence
  Synthetic
QQYYSSSTWT

SEQ ID NO: 7905 - protein, 117 aa, Artificial Sequence
  Synthetic
EVQLVESGGGLIQPGGSLRLSCAASGLTVSSNYMSWVRQAPGKGLEWVSVIYSGGSTFYADSVKGRFTISRDNSKNTLYLQMNSLRDEDTAVYYCARDRGNDAFDIWGLGTMVTVSS

SEQ ID NO: 7906 - protein, 11 aa, Artificial Sequence
  Synthetic
ARDRGNDAFDI

SEQ ID NO: 7907 - protein, 109 aa, Artificial Sequence
  Synthetic
DIQLTQSPSFLSASVGDRVTITCRASQGISSYLAWYQQKPGKAPKLLIYAASTLQSGVPSRFSGSGSGTEFTLTISSLQPEDFAVYYCQQLNSYPPLFTFGPGTKVDIK

SEQ ID NO: 7908 - protein, 11 aa, Artificial Sequence
  Synthetic
QQLNSYPPLFT

SEQ ID NO: 7909 - protein, 122 aa, Artificial Sequence
  Synthetic
QVQLVESGGGVVQPGRSLRLSCAASGFTFSSYGMHWVRQAPGKGLEWVATISYDGSNKYYADSVKGRFTISRDNSKNTLYVQMNSLRAEDTAVYYCAKAVYYYESSGYPLHWGQGTLVTVSS

SEQ ID NO: 7910 - protein, 15 aa, Artificial Sequence
  Synthetic
AKAVYYYESSGYPLH

SEQ ID NO: 7911 - protein, 108 aa, Artificial Sequence
  Synthetic
DIQMTQSPSSLSASVGDRVTITCQASQDISNYLNWYQQKPGKAPKLLIYDASNLETGVPSRFSGSGSGTDFTFTISSLQPEDIATYYCQQYDNLSPLTFGGGTKVEIK

SEQ ID NO: 7912 - protein, 10 aa, Artificial Sequence
  Synthetic
QQYDNLSPLT

SEQ ID NO: 7913 - protein, 127 aa, Artificial Sequence
  Synthetic
EVQLLESGGGLVQPGGSLRISCEASGFAFRTYGMSWVRQAPGKGLEWVSSISGGGGRTQHADSLKGRFTISRDNFDNTLYLQMNSLRAEDTAVYYCAKDHLRCSDTTCYNNYGMDVWGQGTTVTVSS

SEQ ID NO: 7914 - protein, 20 aa, Artificial Sequence
  Synthetic
AKDHLRCSDTTCYNNYGMDV

SEQ ID NO: 7915 - protein, 111 aa, Artificial Sequence
  Synthetic
DIVMTQSPLSLPVIPGEPASISCRSSQSLLHSNGNNYLDWYLQKPGHSPQLLIYLGSKRASGVPDRFSGSGSGTDFTLKISRVEAEDVGAYFCMQGLQTPYTFGQGTKLEI

SEQ ID NO: 7916 - protein, 9 aa, Artificial Sequence
  Synthetic
MQGLQTPYT

SEQ ID NO: 7917 - protein, 126 aa, Artificial Sequence
  Synthetic
EVQLVESGGGLVKPGGSLRLSCAASGFTFSTYSMNWVRQAPGKGLEWVSSISSSSSYIYYSDSVKGRFTISRDNAKNSLYLQMNSLRAEDTAVYYCARDRIYDIVGYSFARDFDYWGQGTLVTVSS

SEQ ID NO: 7918 - protein, 19 aa, Artificial Sequence
  Synthetic
ARDRIYDIVGYSFARDFDY

SEQ ID NO: 7919 - protein, 112 aa, Artificial Sequence
  Synthetic
DIVMTQSPLSLPVTPGEPASISCRSSQSLLHSNGYNHLDWYLQKPGQSPQLLIYLTSNRASGVPDRFSGSGSGTDFTLKISRVEAEDVGIYYCMQALQTPLTFGGGTKVEIK

SEQ ID NO: 7920 - protein, 9 aa, Artificial Sequence
  Synthetic
MQALQTPLT

SEQ ID NO: 7921 - protein, 123 aa, Artificial Sequence
  Synthetic
QVQLVESGGGVVQPGRSLRLSCAASGFTFGSYGLHWVRQAPGKGLEWVAVISYDGSKTYYADSVKGRFTISRDNSKNTLYLQMNSLRAEDTAVYYCAKGGGYYDSGILRWDYWGQGTLVTVSS

SEQ ID NO: 7922 - protein, 16 aa, Artificial Sequence
  Synthetic
AKGGGYYDSGILRWDY

SEQ ID NO: 7923 - protein, 107 aa, Artificial Sequence
  Synthetic
DIQMTQSPSSLSASVGDRVTITCQASQDISNYLNWYQQKPGKAPKLLIYDASNLETGVPSRFSGSGSGTDFTFTISNLQPEDFATYYCQQFDNLPLTFGQGTRLDIK

SEQ ID NO: 7924 - protein, 9 aa, Artificial Sequence
  Synthetic
QQFDNLPLT

SEQ ID NO: 7925 - protein, 124 aa, Artificial Sequence
  Synthetic
EVQLVESGGGLIQPGGSLRLSCAASGVTVSSNYMNWVRQAPGKGLEWVSVIYSGGSTYYADSVKGRFTISRDNSNNTLYLQMNNLRAEDSAVYYCAREGSVGTTHPRGFGMDVWGQGTTVTVSS

SEQ ID NO: 7926 - protein, 18 aa, Artificial Sequence
  Synthetic
AREGSVGTTHPRGFGMDV

SEQ ID NO: 7927 - protein, 105 aa, Artificial Sequence
  Synthetic
DIQMTQSPSSLSASVGDRVTITCQASQDINNLNWYQQEPGKAPKLLIYDASNLQTGVPLRFSGSGSGTDFTFTISSLQPADIATYYCQQYDNVPPSFGPGTKVDI

SEQ ID NO: 7928 - protein, 9 aa, Artificial Sequence
  Synthetic
QQYDNVPPS

SEQ ID NO: 7929 - protein, 126 aa, Artificial Sequence
  Synthetic
QVQLVESGGGVVQPGRSLRLSCAVSGFNFSSYGMHWVRQAPGKGLEWVTVILYDGSNKYYADSVKGRFTISRDNSKNTLFLQMNSLRPEDTAVYYCAKGSWFGDGPGFYFYGMDVWGQGTTVTVSS

SEQ ID NO: 7930 - protein, 19 aa, Artificial Sequence
  Synthetic
AKGSWFGDGPGFYFYGMDV

SEQ ID NO: 7931 - protein, 107 aa, Artificial Sequence
  Synthetic
EIVMTQSPATLSVSPGERATLSCRASQIISGDLAWYQQKPGQAPRLLIYGASTRATGIPVRFSGSGSGTEFTLTISSLQSEDFAVYYCQQYNNWPLTFGGGTKVEIK

SEQ ID NO: 7932 - protein, 9 aa, Artificial Sequence
  Synthetic
QQYNNWPLT

SEQ ID NO: 7933 - protein, 125 aa, Artificial Sequence
  Synthetic
QVQLVQSGAEVKKPGSSMKVSCKASGGTFSNYTLNWVRQAPGQGLVWMVTIIPIFDIKNYAQKFQGRVTITADKSTSTAYLELSSLRSEDTAVYYCTTSPLIESTGTELSYFDSWGQGTLVTVSS

SEQ ID NO: 7934 - protein, 18 aa, Artificial Sequence
  Synthetic
TTSPLIESTGTELSYFDS

SEQ ID NO: 7935 - protein, 108 aa, Artificial Sequence
  Synthetic
EIVLTQSPATLSLSPGERATLSCRASQSVSTYLAWYQQKPGQAPRLLIYDASNRATGIPARFSGSGSGTDFTLTISSLEPEDFAVYHCQQRSNWQGATFGPGTKVEIK

SEQ ID NO: 7936 - protein, 10 aa, Artificial Sequence
  Synthetic
QQRSNWQGAT

SEQ ID NO: 7937 - protein, 127 aa, Artificial Sequence
  Synthetic
QVQLVQSGAEVKKPGSSVKVSCKASGGTFSRYTITWVRHAPGQGLEWMGRIIPILGIPPDYAQKFQGRVTITADKSTNIAYMELGSLRSEDTAVYYCARVRFEYYHESSTYSLPDVWGQGTTVTVSS

SEQ ID NO: 7938 - protein, 19 aa, Artificial Sequence
  Synthetic
ARVRFEYYHESSTYSLPDV

SEQ ID NO: 7939 - protein, 112 aa, Artificial Sequence
  Synthetic
DIVMTQSPDSLAVSLGERATINCKSSQSVLYSSNNKNYLAWYQLKPGQPPNLLIYWASTRESGVPDRFSGSGSGTDFTLTINSLQAEDVAVYFCHQYYDTPETFGQGTKVEI

SEQ ID NO: 7940 - protein, 9 aa, Artificial Sequence
  Synthetic
HQYYDTPET

SEQ ID NO: 7941 - protein, 123 aa, Artificial Sequence
  Synthetic
QMQLVQSGPEVKKPGTSVRVSCKASGFTFSSAAVQWVRQARGQRLEWIGWIVPGSGNPNYAQKFQERVTLSRDMSTSTAYMYLSSLRSEDTAVYYCAAPYCTGGTCRDAFDIWGQGTMVTVSS

SEQ ID NO: 7942 - protein, 16 aa, Artificial Sequence
  Synthetic
AAPYCTGGTCRDAFDI

SEQ ID NO: 7943 - protein, 108 aa, Artificial Sequence
  Synthetic
  misc_feature (9)..(10): Xaa can be any naturally occurring amino acid
EIVLTQSPXXLSLSPGERVTLSCRASQSISSSYLAWYQQKLGQAPRLLVYGPSSRATGIPDRFSGSGSGTDFTLTISRLEPEDFAVYYCQQYGSSPWTFGQGTKVEIK

SEQ ID NO: 7944 - protein, 9 aa, Artificial Sequence
  Synthetic
QQYGSSPWT

SEQ ID NO: 7945 - protein, 128 aa, Artificial Sequence
  Synthetic
QLQLQESGPGLVKPSETLSLTCTVSGGSISSNNYYWSWIRQPPGKGLEWIGSIHYTGSTYYNPSLKSRVTISVDTSKNQFSLKLSSVTAADTAVFYCARHSAHYYDSRGISHWGYFQHWGQGTLVTVS

SEQ ID NO: 7946 - protein, 21 aa, Artificial Sequence
  Synthetic
ARHSAHYYDSRGISHWGYFQH

SEQ ID NO: 7947 - protein, 106 aa, Artificial Sequence
  Synthetic
DIQMTQSPSSLSASVGDRVTITCQASQDISNYLNWYQQKPGKAPNLLISDASDLETGVPSRFSGSGSGTDFTFTISSLQPEDIATYYCQQYDNLPTFGPGTKVEIK

SEQ ID NO: 7948 - protein, 8 aa, Artificial Sequence
  Synthetic
QQYDNLPT

SEQ ID NO: 7949 - protein, 123 aa, Artificial Sequence
  Synthetic
QVQLQESGPGLVKPSQTLSLTCIVSGGSISSGGYYWSWIRQHPGKGLEWIGYIYYSGSTYYNPSLKSRVTISVDTSKNQFSLKLTSVTAADTAVYYCARDVLYYDSSGSFDPWGQGTLVTVSS

SEQ ID NO: 7950 - protein, 15 aa, Artificial Sequence
  Synthetic
ARDVLYYDSSGSFDP

SEQ ID NO: 7951 - protein, 112 aa, Artificial Sequence
  Synthetic
DIVMTQSPLSLPVTPGESASISCRSSQGLLQSNGYNYLDWYLQKPGQSPQLLIYLGSNRASGVPDRFSGSGSGTHFTLKISRVEAEDVGVYYCMQALQTPQTFGQGTKVEIK

SEQ ID NO: 7952 - protein, 9 aa, Artificial Sequence
  Synthetic
MQALQTPQT

SEQ ID NO: 7953 - protein, 124 aa, Artificial Sequence
  Synthetic
QLQLQESGSGLVKPSQTLSLTCAVSGGSISSGGYSWSWIRQPPGKGLEWIGFIYHTGSTYYNPSLKSRVTISVQRSENQFSLKLSSVTAADTAVYYCARHNYDTSGYPNAFDIWGQGTMVTVSS

SEQ ID NO: 7954 - protein, 16 aa, Artificial Sequence
  Synthetic
ARHNYDTSGYPNAFDI

SEQ ID NO: 7955 - protein, 106 aa, Artificial Sequence
  Synthetic
  misc_feature (12)..(12): Xaa can be any naturally occurring amino acid
DIQMTQSPSSVXASVGDRVTITCRASQGISNWLAWYQQKPGRAPKLLIYAASSLQSGVPSRFSGSGSGTDFTLTISSLQPEDFATYYCQQANSFLTFGGGTRVEIK

SEQ ID NO: 7956 - protein, 8 aa, Artificial Sequence
  Synthetic
QQANSFLT

SEQ ID NO: 7957 - protein, 127 aa, Artificial Sequence
  Synthetic
QLQLQESGPGLVKPSETLSLTCTVSGGSISSRNYYWGWIRQPPGKGLEWIGSIYYSGNTYNNPSLKSRVTISVDTSKNQFSLRLSSVTAADTAVYYCARHPRAATGTWGIWIYFDYWGQGTRVTVSS

SEQ ID NO: 7958 - protein, 19 aa, Artificial Sequence
  Synthetic
ARHPRAATGTWGIWIYFDY

SEQ ID NO: 7959 - protein, 107 aa, Artificial Sequence
  Synthetic
EIVMTQSPATLSVSPGERVTLSCRASQSVSSNLAWYQQKPGQAPRLLIYGTSTRATGIPARFSDSGSGTEFTLTISSLQSEDFAVYYCQQYDNWPLTFGGGTKVEIK

SEQ ID NO: 7960 - protein, 9 aa, Artificial Sequence
  Synthetic
QQYDNWPLT

SEQ ID NO: 7961 - protein, 127 aa, Artificial Sequence
  Synthetic
QVQLVQSGAEVKKPGASVKVSCKASGYILTTYGMSWVRQAPGQGLEWMGWISAHNGYTNYVQKLQGRVTMTTDTSTSTAYMELRSLRSDDTAVYYCARDAEITISGVVIPNYGMDVWGQGTTVTVSS

SEQ ID NO: 7962 - protein, 20 aa, Artificial Sequence
  Synthetic
ARDAEITISGVVIPNYGMDV

SEQ ID NO: 7963 - protein, 112 aa, Artificial Sequence
  Synthetic
DIVMTQTPLSSPVTLGQPASISCRSSQSLVHSDGNTYLSWLQQRPGQPPRLLIYKISNRFSGVPDRFSGSGAGTDFTLKISRVEAEDVGVYYCMQATQFPQTFGQGTKVEIK

SEQ ID NO: 7964 - protein, 9 aa, Artificial Sequence
  Synthetic
MQATQFPQT

SEQ ID NO: 7965 - protein, 119 aa, Artificial Sequence
  Synthetic
EVQLVESGGGLEQPGGSLRLSCAASGFSFSNYDMHWVRQGTGKDLEWVSAIGTAGDTYYADSVKGRFTISRENAKNSLYLQMNSLRAGDTAVYYCARGYGDFYWYFDLWGRGTLVTVSS

SEQ ID NO: 7966 - protein, 13 aa, Artificial Sequence
  Synthetic
ARGYGDFYWYFDL

SEQ ID NO: 7967 - protein, 108 aa, Artificial Sequence
  Synthetic
DIQMTQSPSSLSASVGDRVTITCRASQNIRTYLNWYQQKPGKAPNLLIYVASSLQSGVPSRFSGSGSGTHFTLTISSLQPEDFATYYCQQGYSMPPPTFGGGTKVEIK

SEQ ID NO: 7968 - protein, 10 aa, Artificial Sequence
  Synthetic
QQGYSMPPPT

SEQ ID NO: 7969 - protein, 117 aa, Artificial Sequence
  Synthetic
  misc_feature (36)..(37): Xaa can be any naturally occurring amino acid
  misc_feature (40)..(41): Xaa can be any naturally occurring amino acid
  misc_feature (50)..(50): Xaa can be any naturally occurring amino acid
EVQLVESGGGLVQPGGSLRLSCAASGITVSSKYMRXXVQXXEWGGELVQXGGSVRISCAASGITVSSNYMRDNSKNTLYLQMNSLRSEDTAVYYCARDLVSFGMDVWGQGTTVTVSS

SEQ ID NO: 7970 - protein, 11 aa, Artificial Sequence
  Synthetic
ARDLVSFGMDV

SEQ ID NO: 7971 - protein, 107 aa, Artificial Sequence
  Synthetic
  misc_feature (9)..(10): Xaa can be any naturally occurring amino acid
DIQLTQSPXXLSASVGDRVTITCRASQGISSYLAWYQQKPGKAPKLLIYAASTLQSGVPSRFSGSGSATEFTLTISSLQPEDFATYYCQQLNSYSLTFGGGTKVEIK

SEQ ID NO: 7972 - protein, 9 aa, Artificial Sequence
  Synthetic
QQLNSYSLT

SEQ ID NO: 7973 - protein, 122 aa, Artificial Sequence
  Synthetic
EVQLVESGGGLVQPGGSLTLSCAASGFTFSNYDIHWVRQPTGKGLEWVSAIGTAGDTYYPDSVKGRFTISRENAKNSLSLQMNSLRVEDTAVYYCARGFLDSSYSSGWYDYWGQGTLVTVSS

SEQ ID NO: 7974 - protein, 16 aa, Artificial Sequence
  Synthetic
ARGFLDSSYSSGWYDY

SEQ ID NO: 7975 - protein, 108 aa, Artificial Sequence
  Synthetic
EIVMTQSPATLSVSPGERATLSCRASQSVSSNLAWYQQKPGQAPRLLVYGASTRATAIPARFSGSGSGTEFTLTISSLQSEDFAVYYCQQYHNWPALTFGGGTKVEIK

SEQ ID NO: 7976 - protein, 10 aa, Artificial Sequence
  Synthetic
QQYHNWPALT

SEQ ID NO: 7977 - protein, 122 aa, Artificial Sequence
  Synthetic
QVQLQESGPGVVKPSETLSLTCTVSGGSISSDDHYWNWIRQPPGKGLEWIGYIFYSGSTFYNPSLRSRITMSVDTSKNQFSLRVKSVTAADTAVYYCARDGGDTSDWYFDLWGRGTLVTVSS

SEQ ID NO: 7978 - protein, 14 aa, Artificial Sequence
  Synthetic
ARDGGDTSDWYFDL

SEQ ID NO: 7979 - protein, 107 aa, Artificial Sequence
  Synthetic
DIQMTQSPVSLSASVGDRVTITCRASQDITNYLAWYQQKPGKVPKLLIYAASTLQSGVPSRFSGSGSGTDFTLTITSLQPEDIATYYCQKYNSAPFTFGPGTKVDIK

SEQ ID NO: 7980 - protein, 9 aa, Artificial Sequence
  Synthetic
QKYNSAPFT

SEQ ID NO: 7981 - protein, 117 aa, Artificial Sequence
  Synthetic
EVQLVESGGGLIQPGGSLRLSCAASGIIVSSNYMSWVRQAPGKGLEWVSVIYSGGSTFYTDSVKGRFTISRDSSKNTLYLQMSRLRAEDTAMYYCARDWGEFYFDYWGQGTLVTVSS

SEQ ID NO: 7982 - protein, 11 aa, Artificial Sequence
  Synthetic
ARDWGEFYFDY

SEQ ID NO: 7983 - protein, 108 aa, Artificial Sequence
  Synthetic
EIVLTQSPGTLSLSPGERATLSCRASQSVSSSYLAWYQQKPGQAPRLLIHGTSSRATGIPDRFSGSGSGTDFTLTIIRLEPEDFAVYYCQQYGSSPRTFGQGTKVEIK

SEQ ID NO: 7984 - protein, 9 aa, Artificial Sequence
  Synthetic
QQYGSSPRT

SEQ ID NO: 7985 - protein, 122 aa, Artificial Sequence
  Synthetic
QVQLVESGGGVVQPGRSLRLSCAASGFTFSNYALHWVRQAPGKGLEWVALISYDGSDKFYADSVKGRFTISRDNSKNTVYLQMNSLRAEDTAVFYCAKEMASHYYFYYGLDVWGPGTTVTVS

SEQ ID NO: 7986 - protein, 16 aa, Artificial Sequence
  Synthetic
AKEMASHYYFYYGLDV

SEQ ID NO: 7987 - protein, 107 aa, Artificial Sequence
  Synthetic
EIVLTQSPATLSLSPGERATLSCRASQSVSSYLAWYQQKPGQAPRLLIFDASNRATGIPARFSGSGSGTDFTLTISSLDLEDFAFYYCQQRSNWPGTFGGGTKVEIK

SEQ ID NO: 7988 - protein, 9 aa, Artificial Sequence
  Synthetic
QQRSNWPGT

SEQ ID NO: 7989 - protein, 124 aa, Artificial Sequence
  Synthetic
QMQLVQSGPEVKKPGTSVRVSCKASGFTFITASAVQWVRQARGQRLEWIGWIVVGSGNTDYAQRFQERVTISSDMSTSTVNMDLRSLRSEDTAVYYCAAPYCSGGTCRDGFDIWGQGTMVTVSS

SEQ ID NO: 7990 - protein, 16 aa, Artificial Sequence
  Synthetic
AAPYCSGGTCRDGFDI

SEQ ID NO: 7991 - protein, 109 aa, Artificial Sequence
  Synthetic
EIVLTQSPGTLSLSPGERATLSCRASQSVRNNNYLAWYQQRPGQAPRLLIYGASSRAPGIPDRFSGSGSGTDFTLTISSLEPEDFAVYYCQQYSISPWTFGQGTKVEIK

SEQ ID NO: 7992 - protein, 9 aa, Artificial Sequence
  Synthetic
QQYSISPWT

SEQ ID NO: 7993 - protein, 123 aa, Artificial Sequence
  Synthetic
QMQLVQSGPEVKKPGTSVRVSCKASGFTFITASAVQWVRQARGQRLEWIGWIVVGSGNTENAQKFQERVTISGDMSTSTVNMELRSLRSEDTAVYYCAAPYCSGGTCRDGFDIWGQGTMVTVS

SEQ ID NO: 7994 - protein, 16 aa, Artificial Sequence
  Synthetic
AAPYCSGGTCRDGFDI

SEQ ID NO: 7995 - protein, 109 aa, Artificial Sequence
  Synthetic
EIVLTQSPGTLSLSPGERATLTCRASQSIRKNNYLAWYQQRPGQAPRLLIYGASSRATGIPDRFSGSGSGTDFTLTISSLEPEDFAVYYCQQYSISPWTFGQGTKVEIK

SEQ ID NO: 7996 - protein, 9 aa, Artificial Sequence
  Synthetic
QQYSISPWT

SEQ ID NO: 7997 - protein, 117 aa, Artificial Sequence
  Synthetic
EVQLVESGGDLVQPGGSLRLSCAASGITVSSNYMSWVRQAPGKGLEWVSVLYAGGSTYYADSVKGRFTISRDNSKNTLYLQMNSLRAEDTAVYYCARDLVVRAFDIWGQGTLVTVSS

SEQ ID NO: 7998 - protein, 11 aa, Artificial Sequence
  Synthetic
ARDLVVRAFDI

SEQ ID NO: 7999 - protein, 107 aa, Artificial Sequence
  Synthetic
DIQLTQSPSFLSASVGDRVTITCRASQGISSYLAWYQQKPGKAPKLLIYAASTLQSGVPSRFSGSGSGTEFALTISSLQPEDFATYYCQQLNSYPPPFGQGTRLEIK

SEQ ID NO: 8000 - protein, 9 aa, Artificial Sequence
  Synthetic
QQLNSYPPP

SEQ ID NO: 8001 - protein, 131 aa, Artificial Sequence; identical to SEQ ID NO: 6001
  Synthetic

SEQ ID NO: 8002 - protein, 24 aa, Artificial Sequence
  Synthetic
AREDFILVSAPIRENSYYYYGMDV

SEQ ID NO: 8003 - protein, 108 aa, Artificial Sequence; identical to SEQ ID NO: 6003
  Synthetic

SEQ ID NO: 8004 - protein, 9 aa, Artificial Sequence
  Synthetic
QQYGGSPRT

SEQ ID NO: 8005 - protein, 117 aa, Artificial Sequence; identical to SEQ ID NO: 6005
  Synthetic

SEQ ID NO: 8006 - protein, 10 aa, Artificial Sequence
  Synthetic
AKTGPSQGDY

SEQ ID NO: 8007 - protein, 112 aa, Artificial Sequence; identical to SEQ ID NO: 6007
  Synthetic

SEQ ID NO: 8008 - protein, 8 aa, Artificial Sequence
  Synthetic
QQYYSWCS

SEQ ID NO: 8009 - protein, 115 aa, Artificial Sequence; identical to SEQ ID NO: 6009
  Synthetic

SEQ ID NO: 8010 - protein, 9 aa, Artificial Sequence
  Synthetic
ARESYGLDV

SEQ ID NO: 8011 - protein, 109 aa, Artificial Sequence; identical to SEQ ID NO: 6011
  Synthetic

SEQ ID NO: 8012 - protein, 10 aa, Artificial Sequence
  Synthetic
QLYGSSSGYT

SEQ ID NO: 8013 - protein, 117 aa, Artificial Sequence; identical to SEQ ID NO: 6013
  Synthetic

SEQ ID NO: 8014 - protein, 11 aa, Artificial Sequence
  Synthetic
ARDLDYYGMDV

SEQ ID NO: 8015 - protein, 106 aa, Artificial Sequence; identical to SEQ ID NO: 6015
  Synthetic

SEQ ID NO: 8016 - protein, 9 aa, Artificial Sequence
  Synthetic
QQLGSSPVC

SEQ ID NO: 8017 - protein, 122 aa, Artificial Sequence; identical to SEQ ID NO: 6017
  Synthetic

SEQ ID NO: 8018 - protein, 16 aa, Artificial Sequence
  Synthetic
ARDREISGWTGWYFDL

SEQ ID NO: 8019 - protein, 108 aa, Artificial Sequence; identical to SEQ ID NO: 6019
  Synthetic

SEQ ID NO: 8020 - protein, 10 aa, Artificial Sequence
  Synthetic
QQSYSTPPIT

SEQ ID NO: 8021 - protein, 128 aa, Artificial Sequence; identical to SEQ ID NO: 6021
  Synthetic

SEQ ID NO: 8022 - protein, 21 aa, Artificial Sequence
  Synthetic
ARDTPGGDDIMTGWGLYGMDV

SEQ ID NO: 8023 - protein, 106 aa, Artificial Sequence; identical to SEQ ID NO: 6023
  Synthetic
  misc_feature (83)..(83): Xaa can be any naturally occurring amino acid

SEQ ID NO: 8024 - protein, 9 aa, Artificial Sequence
  Synthetic
QHSYSTPST

SEQ ID NO: 8025 - protein, 122 aa, Artificial Sequence; identical to SEQ ID NO: 6025
  Synthetic

SEQ ID NO: 8026 - protein, 16 aa, Artificial Sequence
  Synthetic
VRDREISGWTGWYFDL

SEQ ID NO: 8027 - protein, 108 aa, Artificial Sequence; identical to SEQ ID NO: 6027
  Synthetic

SEQ ID NO: 8028 - protein, 10 aa, Artificial Sequence
  Synthetic
QQSYSTPPIT

SEQ ID NO: 8029 - protein, 123 aa, Artificial Sequence; identical to SEQ ID NO: 6029
  Synthetic

SEQ ID NO: 8030 - protein, 16 aa, Artificial Sequence
  Synthetic
ATDDGGSWSGSSWFDP

SEQ ID NO: 8031 - protein, 108 aa, Artificial Sequence; identical to SEQ ID NO: 6031
  Synthetic

SEQ ID NO: 8032 - protein, 10 aa, Artificial Sequence
  Synthetic
QQSYSTPPFT

SEQ ID NO: 8033 - protein, 127 aa, Artificial Sequence; identical to SEQ ID NO: 6033
  Synthetic

SEQ ID NO: 8034 - protein, 20 aa, Artificial Sequence
  Synthetic
AKALSSTYYYDASGPDAFDI

SEQ ID NO: 8035 - protein, 107 aa, Artificial Sequence; identical to SEQ ID NO: 428
  Synthetic

SEQ ID NO: 8036 - protein, 9 aa, Artificial Sequence
  Synthetic
QQYNSYSYT

SEQ ID NO: 8037 - protein, 122 aa, Artificial Sequence; identical to SEQ ID NO: 6037
  Synthetic

SEQ ID NO: 8038 - protein, 15 aa, Artificial Sequence
  Synthetic
AKSPLVYAPHIFFDC

SEQ ID NO: 8039 - protein, 106 aa, Artificial Sequence; identical to SEQ ID NO: 6039
  Synthetic

SEQ ID NO: 8040 - protein, 8 aa, Artificial Sequence
  Synthetic
QQHSNWLT

SEQ ID NO: 8041 - protein, 124 aa, Artificial Sequence; identical to SEQ ID NO: 6041
  Synthetic

SEQ ID NO: 8042 - protein, 17 aa, Artificial Sequence
  Synthetic
ARQGGQQLSYYYYGMDV

SEQ ID NO: 8043 - protein, 107 aa, Artificial Sequence; identical to SEQ ID NO: 6043
  Synthetic

SEQ ID NO: 8044 - protein, 9 aa, Artificial Sequence
  Synthetic
QQSYSTPGT

SEQ ID NO: 8045 - protein, 121 aa, Artificial Sequence; identical to SEQ ID NO: 6045
  Synthetic

SEQ ID NO: 8046 - protein, 14 aa, Artificial Sequence
  Synthetic
ARGLDGSSSASPDS

SEQ ID NO: 8047 - protein, 107 aa, Artificial Sequence; identical to SEQ ID NO: 6047
  Synthetic

SEQ ID NO: 8048 - protein, 9 aa, Artificial Sequence
  Synthetic
QQGNSFPLT

SEQ ID NO: 8049 - protein, 122 aa, Artificial Sequence; identical to SEQ ID NO: 6049
  Synthetic

SEQ ID NO: 8050 - protein, 15 aa, Artificial Sequence
  Synthetic
AKDFGAFIIGDWFDP

SEQ ID NO: 8051 - protein, 108 aa, Artificial Sequence; identical to SEQ ID NO: 6051
  Synthetic

SEQ ID NO: 8052 - protein, 10 aa, Artificial Sequence
  Synthetic
QQYNNWPPIT

SEQ ID NO: 8053 - protein, 125 aa, Artificial Sequence; identical to SEQ ID NO: 6053
  Synthetic

SEQ ID NO: 8054 - protein, 18 aa, Artificial Sequence
  Synthetic
ATERIAVSDTRMYNWFDP

SEQ ID NO: 8055 - protein, 108 aa, Artificial Sequence; identical to SEQ ID NO: 6055
  Synthetic

SEQ ID NO: 8056 - protein, 10 aa, Artificial Sequence
  Synthetic
QQSYSAPPWT

SEQ ID NO: 8057 - protein, 124 aa, Artificial Sequence; identical to SEQ ID NO: 6057
  Synthetic

SEQ ID NO: 8058 - protein, 16 aa, Artificial Sequence
  Synthetic
ARLETSGWYTEDVFDI

SEQ ID NO: 8059 - protein, 107 aa, Artificial Sequence; identical to SEQ ID NO: 6059
  Synthetic

SEQ ID NO: 8060 - protein, 9 aa, Artificial Sequence
  Synthetic
QRSYSAMYT

SEQ ID NO: 8061 - protein, 127 aa, Artificial Sequence; identical to SEQ ID NO: 6061
  Synthetic

SEQ ID NO: 8062 - protein, 20 aa, Artificial Sequence
  Synthetic
AREGWHYDSSYYREYDDLDI

SEQ ID NO: 8063 - protein, 113 aa, Artificial Sequence; identical to SEQ ID NO: 6063
  Synthetic

SEQ ID NO: 8064 - protein, 10 aa, Artificial Sequence
  Synthetic
SQSTHVPPWT

SEQ ID NO: 8065 - protein, 117 aa, Artificial Sequence; identical to SEQ ID NO: 6065
  Synthetic

SEQ ID NO: 8066 - protein, 11 aa, Artificial Sequence
  Synthetic
ARETLGRGGDC

SEQ ID NO: 8067 - protein, 107 aa, Artificial Sequence; identical to SEQ ID NO: 6067
  Synthetic

SEQ ID NO: 8068 - protein, 9 aa, Artificial Sequence
  Synthetic
QQYDNLPRS

SEQ ID NO: 8069 - protein, 122 aa, Artificial Sequence; identical to SEQ ID NO: 6069
  Synthetic

SEQ ID NO: 8070 - protein, 16 aa, Artificial Sequence
  Synthetic
ARDRETSGWYGWYFDL

SEQ ID NO: 8071 - protein, 108 aa, Artificial Sequence; identical to SEQ ID NO: 6071
  Synthetic

SEQ ID NO: 8072 - protein, 10 aa, Artificial Sequence
  Synthetic
QQSYSTPPIT

SEQ ID NO: 8073 - protein, 128 aa, Artificial Sequence; identical to SEQ ID NO: 6073
  Synthetic

SEQ ID NO: 8074 - protein, 21 aa, Artificial Sequence
  Synthetic
AKDTPGGDDIMTGWGLYGMDV

SEQ ID NO: 8075 - protein, 107 aa, Artificial Sequence; identical to SEQ ID NO: 6075
  Synthetic

SEQ ID NO: 8076 - protein, 9 aa, Artificial Sequence
  Synthetic
QQSYSTPWT

SEQ ID NO: 8077 - protein, 122 aa, Artificial Sequence; identical to SEQ ID NO: 6077
  Synthetic

SEQ ID NO: 8078 - protein, 15 aa, Artificial Sequence
  Synthetic
ARDIVLVPAAYGMDV

SEQ ID NO: 8079 - protein, 108 aa, Artificial Sequence; identical to SEQ ID NO: 6079
  Synthetic

SEQ ID NO: 8080 - protein, 10 aa, Artificial Sequence
  Synthetic
QQRNNWPPLT

SEQ ID NO: 8081 - protein, 130 aa, Artificial Sequence; identical to SEQ ID NO: 6081
  Synthetic

SEQ ID NO: 8082 - protein, 18 aa, Artificial Sequence
  Synthetic
VRGDMLTGSSQYYYIMDV

SEQ ID NO: 8083 - protein, 107 aa, Artificial Sequence; identical to SEQ ID NO: 6083
  Synthetic

SEQ ID NO: 8084 - protein, 9 aa, Artificial Sequence
  Synthetic
QQSYSSMYT

SEQ ID NO: 8085 - protein, 120 aa, Artificial Sequence; identical to SEQ ID NO: 6085
  Synthetic

SEQ ID NO: 8086 - protein, 13 aa, Artificial Sequence
  Synthetic
ARDGIPFRYGMDV

SEQ ID NO: 8087 - protein, 107 aa, Artificial Sequence; identical to SEQ ID NO: 6087
  Synthetic

SEQ ID NO: 8088 - protein, 9 aa, Artificial Sequence
  Synthetic
QHYHSYSGT

SEQ ID NO: 8089 - protein, 124 aa, Artificial Sequence; identical to SEQ ID NO: 6089
  Synthetic

SEQ ID NO: 8090 - protein, 17 aa, Artificial Sequence
  Synthetic
ARHWGPQKSYYYYGMDV

SEQ ID NO: 8091 - protein, 106 aa, Artificial Sequence; identical to SEQ ID NO: 6091
  Synthetic

SEQ ID NO: 8092 - protein, 9 aa, Artificial Sequence
  Synthetic
QQSYSTPPA

SEQ ID NO: 8093 - protein, 134 aa, Artificial Sequence; identical to SEQ ID NO: 6093
  Synthetic

SEQ ID NO: 8094 - protein, 27 aa, Artificial Sequence
  Synthetic
ARDTGDSSGWYPPPILKYNYYYYGMDV

SEQ ID NO: 8095 - protein, 107 aa, Artificial Sequence; identical to SEQ ID NO: 6095
  Synthetic

SEQ ID NO: 8096 - protein, 9 aa, Artificial Sequence
  Synthetic
LQHNSYPRT

SEQ ID NO: 8097 - protein, 130 aa, Artificial Sequence; identical to SEQ ID NO: 6097
  Synthetic

SEQ ID NO: 8098 - protein, 23 aa, Artificial Sequence
  Synthetic
VKGYRYYYDILTGYYNDAGAFDY

SEQ ID NO: 8099 - protein, 107 aa, Artificial Sequence; identical to SEQ ID NO: 6099
  Synthetic

SEQ ID NO: 8100 - protein, 9 aa, Artificial Sequence
  Synthetic
QQLNDYPFT

SEQ ID NO: 8101 - protein, 124 aa, Artificial Sequence; identical to SEQ ID NO: 6101
  Synthetic

SEQ ID NO: 8102 - protein, 16 aa, Artificial Sequence
  Synthetic
ARLETSGWYTGDVFDI

SEQ ID NO: 8103 - protein, 107 aa, Artificial Sequence; identical to SEQ ID NO: 6103
  Synthetic

SEQ ID NO: 8104 - protein, 9 aa, Artificial Sequence
  Synthetic
QRSYSAMYS

SEQ ID NO: 8105 - protein, 121 aa, Artificial Sequence; identical to SEQ ID NO: 6105
  Synthetic

SEQ ID NO: 8106 - protein, 14 aa, Artificial Sequence
  Synthetic
AKGLDSSSSASPDY

SEQ ID NO: 8107 - protein, 107 aa, Artificial Sequence; identical to SEQ ID NO: 6107
  Synthetic

SEQ ID NO: 8108 - protein, 9 aa, Artificial Sequence
  Synthetic
QQGNSFPLT

SEQ ID NO: 8109 - protein, 121 aa, Artificial Sequence; identical to SEQ ID NO: 453
  Synthetic

SEQ ID NO: 8110 - protein, 14 aa, Artificial Sequence
  Synthetic
ARDALTAISVRFDY

SEQ ID NO: 8111 - protein, 108 aa, Artificial Sequence; identical to SEQ ID NO: 454
  Synthetic

SEQ ID NO: 8112 - protein, 10 aa, Artificial Sequence
  Synthetic
QQSYSTPSVT

SEQ ID NO: 8113 - protein, 122 aa, Artificial Sequence; identical to SEQ ID NO: 6113
  Synthetic

SEQ ID NO: 8114 - protein, 15 aa, Artificial Sequence
  Synthetic
TRDAGFIPTDNWFDP

SEQ ID NO: 8115 - protein, 111 aa, Artificial Sequence; identical to SEQ ID NO: 6115
  Synthetic

SEQ ID NO: 8116 - protein, 12 aa, Artificial Sequence
  Synthetic
QQYGRSALGMCS

SEQ ID NO: 8117 - protein, 123 aa, Artificial Sequence; identical to SEQ ID NO: 6117
  Synthetic
  misc_feature (53)..(53): Xaa can be any naturally occurring amino acid

SEQ ID NO: 8118 - protein, 16 aa, Artificial Sequence
  Synthetic
ARDPPGEISTTPVLDY

SEQ ID NO: 8119 - protein, 108 aa, Artificial Sequence; identical to SEQ ID NO: 6119
  Synthetic

SEQ ID NO: 8120 - protein, 10 aa, Artificial Sequence
  Synthetic
QQSYSTPPLT

SEQ ID NO: 8121 - protein, 124 aa, Artificial Sequence; identical to SEQ ID NO: 6121
  Synthetic

SEQ ID NO: 8122 - protein, 15 aa, Artificial Sequence
  Synthetic
STSDLIYYYSYGMDV

SEQ ID NO: 8123 - protein, 108 aa, Artificial Sequence; identical to SEQ ID NO: 6123
  Synthetic

SEQ ID NO: 8124 - protein, 10 aa, Artificial Sequence
  Synthetic
QQYNSYSSYT

SEQ ID NO: 8125 - protein, 131 aa, Artificial Sequence; identical to SEQ ID NO: 6125
  Synthetic

SEQ ID NO: 8126 - protein, 24 aa, Artificial Sequence
  Synthetic
AREDFILVSAPIRENSYYYYGMDV

SEQ ID NO: 8127 - protein, 108 aa, Artificial Sequence; identical to SEQ ID NO: 6003
  Synthetic

SEQ ID NO: 8128 - protein, 9 aa, Artificial Sequence
  Synthetic
QQYGGSPRT

SEQ ID NO: 8129 - protein, 129 aa, Artificial Sequence; identical to SEQ ID NO: 6129
  Synthetic

SEQ ID NO: 8130 - protein, 20 aa, Artificial Sequence
  Synthetic
STVGSYYYDSRGPTSDAFDI

SEQ ID NO: 8131 - protein, 113 aa, Artificial Sequence; identical to SEQ ID NO: 6131
  Synthetic

SEQ ID NO: 8132 - protein, 9 aa, Artificial Sequence
  Synthetic
QQYYSTPYT

SEQ ID NO: 8133 - protein, 128 aa, Artificial Sequence; identical to SEQ ID NO: 6133
  Synthetic

SEQ ID NO: 8134 - protein, 21 aa, Artificial Sequence
  Synthetic
ARVGAPMSRVRGYYYYYGMDV

SEQ ID NO: 8135 - protein, 111 aa, Artificial Sequence; identical to SEQ ID NO: 6135
  Synthetic

SEQ ID NO: 8136 - protein, 8 aa, Artificial Sequence
  Synthetic
MQALQRCS

SEQ ID NO: 8137 - protein, 123 aa, Artificial Sequence; identical to SEQ ID NO: 423
  Synthetic

SEQ ID NO: 8138 - protein, 16 aa, Artificial Sequence
  Synthetic
AKDVPIEQQLVPTFDY

SEQ ID NO: 8139 - protein, 108 aa, Artificial Sequence; identical to SEQ ID NO: 424
  Synthetic

SEQ ID NO: 8140 - protein, 10 aa, Artificial Sequence
  Synthetic
QQSYSTLSIT

SEQ ID NO: 8141 - protein, 127 aa, Artificial Sequence; identical to SEQ ID NO: 6141
  Synthetic

SEQ ID NO: 8142 - protein, 20 aa, Artificial Sequence
  Synthetic
AKVLSPTYYDSWSGPDAFDF

SEQ ID NO: 8143 - protein, 108 aa, Artificial Sequence; identical to SEQ ID NO: 6143
  Synthetic

SEQ ID NO: 8144 - protein, 10 aa, Artificial Sequence
  Synthetic
QQYNSYSSWT

SEQ ID NO: 8145 - protein, 118 aa, Artificial Sequence; identical to SEQ ID NO: 6145
  Synthetic

SEQ ID NO: 8146 - protein, 13 aa, Artificial Sequence
  Synthetic
AREPNYHYHGMDV

SEQ ID NO: 8147 - protein, 107 aa, Artificial Sequence; identical to SEQ ID NO: 6147
  Synthetic

SEQ ID NO: 8148 - protein, 9 aa, Artificial Sequence
  Synthetic
QQGNSFLLT

SEQ ID NO: 8149 - protein, 122 aa, Artificial Sequence; identical to SEQ ID NO: 6149
  Synthetic

SEQ ID NO: 8150 - protein, 15 aa, Artificial Sequence
  Synthetic
ARDAFYIPAGGWFDP

SEQ ID NO: 8151 - protein, 108 aa, Artificial Sequence; identical to SEQ ID NO: 6151
  Synthetic

SEQ ID NO: 8152 - protein, 9 aa, Artificial Sequence
  Synthetic
QQYGSSSRT

SEQ ID NO: 8153 - protein, 122 aa, Artificial Sequence; identical to SEQ ID NO: 399
  Synthetic

SEQ ID NO: 8154 - protein, 15 aa, Artificial Sequence
  Synthetic
ARDIVFVPATMAMDV

SEQ ID NO: 8155 - protein, 107 aa, Artificial Sequence; identical to SEQ ID NO: 400
  Synthetic

SEQ ID NO: 8156 - protein, 9 aa, Artificial Sequence
  Synthetic
QQRSNWLFT

SEQ ID NO: 8157 - protein, 120 aa, Artificial Sequence; identical to SEQ ID NO: 6157
  Synthetic

SEQ ID NO: 8158 - protein, 13 aa, Artificial Sequence
  Synthetic
ARDPGYGNHDLDF

SEQ ID NO: 8159 - protein, 103 aa, Artificial Sequence; identical to SEQ ID NO: 6159
  Synthetic

SEQ ID NO: 8160 - protein, 5 aa, Artificial Sequence
  Synthetic
QQART

SEQ ID NO: 8161 - protein, 118 aa, Artificial Sequence; identical to SEQ ID NO: 6161
  Synthetic

SEQ ID NO: 8162 - protein, 12 aa, Artificial Sequence
  Synthetic
ARDLRGPGKFDY

SEQ ID NO: 8163 - protein, 108 aa, Artificial Sequence; identical to SEQ ID NO: 6163
  Synthetic

SEQ ID NO: 8164 - protein, 10 aa, Artificial Sequence
  Synthetic
QQYDNLPEVT

SEQ ID NO: 8165 - protein, 127 aa, Artificial Sequence; identical to SEQ ID NO: 6165
  Synthetic

SEQ ID NO: 8166 - protein, 21 aa, Artificial Sequence
  Synthetic
ARALTYNDILTGGEYFNGMDV

SEQ ID NO: 8167 - protein, 107 aa, Artificial Sequence; identical to SEQ ID NO: 6167
  Synthetic

SEQ ID NO: 8168 - protein, 9 aa, Artificial Sequence
  Synthetic
LQHNSYPWT

SEQ ID NO: 8169 - protein, 117 aa, Artificial Sequence; identical to SEQ ID NO: 6169
  Synthetic

SEQ ID NO: 8170 - protein, 11 aa, Artificial Sequence
  Synthetic
ARDLIVYGMDV

SEQ ID NO: 8171 - protein, 108 aa, Artificial Sequence; identical to SEQ ID NO: 6171
  Synthetic

SEQ ID NO: 8172 - protein, 10 aa, Artificial Sequence
  Synthetic
QQLNSYPMCS

SEQ ID NO: 8173 - protein, 124 aa, Artificial Sequence; identical to SEQ ID NO: 6173
  Synthetic

SEQ ID NO: 8174 - protein, 17 aa, Artificial Sequence
  Synthetic
ARPLLPGETGNLNRLDY

SEQ ID NO: 8175 - protein, 107 aa, Artificial Sequence; identical to SEQ ID NO: 6175
  Synthetic
  misc_feature (45)..(45): Xaa can be any naturally occurring amino acid

SEQ ID NO: 8176 - protein, 9 aa, Artificial Sequence
  Synthetic
QQSYSTLWT

SEQ ID NO: 8177 - protein, 115 aa, Artificial Sequence; identical to SEQ ID NO: 433
  Synthetic

SEQ ID NO: 8178 - protein, 11 aa, Artificial Sequence
  Synthetic
ARDFREGAFDI

SEQ ID NO: 8179 - protein, 107 aa, Artificial Sequence; identical to SEQ ID NO: 434
  Synthetic

SEQ ID NO: 8180 - protein, 9 aa, Artificial Sequence
  Synthetic
QQLNSYSPL

SEQ ID NO: 8181 - protein, 127 aa, Artificial Sequence; identical to SEQ ID NO: 6181
  Synthetic

SEQ ID NO: 8182 - protein, 17 aa, Artificial Sequence
  Synthetic
ARDRPNYYFDSRDAFDI

SEQ ID NO: 8183 - protein, 113 aa, Artificial Sequence; identical to SEQ ID NO: 6183
  Synthetic

SEQ ID NO: 8184 - protein, 9 aa, Artificial Sequence
  Synthetic
QQYYSTPRT

SEQ ID NO: 8185 - protein, 121 aa, Artificial Sequence; identical to SEQ ID NO: 6185
  Synthetic

SEQ ID NO: 8186 - protein, 14 aa, Artificial Sequence
  Synthetic
ARGVEYSSSSNCDF

SEQ ID NO: 8187 - protein, 106 aa, Artificial Sequence; identical to SEQ ID NO: 6187
  Synthetic

SEQ ID NO: 8188 - protein, 9 aa, Artificial Sequence
  Synthetic
QQTNSFPLT

SEQ ID NO: 8189 - protein, 118 aa, Artificial Sequence; identical to SEQ ID NO: 6189
  Synthetic

SEQ ID NO: 8190 - protein, 11 aa, Artificial Sequence
  Synthetic
VREEVGGWFDP

SEQ ID NO: 8191 - protein, 113 aa, Artificial Sequence; identical to SEQ ID NO: 6063
  Synthetic

SEQ ID NO: 8192 - protein, 10 aa, Artificial Sequence
  Synthetic
SQSTHVPPWT

SEQ ID NO: 8193 - protein, 123 aa, Artificial Sequence; identical to SEQ ID NO: 6193
  Synthetic

SEQ ID NO: 8194 - protein, 16 aa, Artificial Sequence
  Synthetic
ARDSNVDTVMVTWFDY

SEQ ID NO: 8195 - protein, 107 aa, Artificial Sequence; identical to SEQ ID NO: 6195
  Synthetic

SEQ ID NO: 8196 - protein, 10 aa, Artificial Sequence
  Synthetic
QQSYSTPPWT

SEQ ID NO: 8197 - protein, 124 aa, Artificial Sequence; identical to SEQ ID NO: 6197
  Synthetic

SEQ ID NO: 8198 - protein, 18 aa, Artificial Sequence
  Synthetic
ARGVITSLDGNYYYYMDV

SEQ ID NO: 8199 - protein, 108 aa, Artificial Sequence; identical to SEQ ID NO: 6199
  Synthetic

SEQ ID NO: 8200 - protein, 10 aa, Artificial Sequence
  Synthetic
QQSYSSPPWT

SEQ ID NO: 8201 - protein, 128 aa, Artificial Sequence; identical to SEQ ID NO: 6201
  Synthetic

SEQ ID NO: 8202 - protein, 21 aa, Artificial Sequence
  Synthetic
AKGPRLHDSLWGSFRFDAFDI

SEQ ID NO: 8203 - protein, 113 aa, Artificial Sequence; identical to SEQ ID NO: 6203
  Synthetic

SEQ ID NO: 8204 - protein, 9 aa, Artificial Sequence
  Synthetic
MQRMDFPYS

SEQ ID NO: 8205 - protein, 129 aa, Artificial Sequence; identical to SEQ ID NO: 6205
  Synthetic

SEQ ID NO: 8206 - protein, 20 aa, Artificial Sequence
  Synthetic
STVGSYYYDSRGPTSDAFDI

SEQ ID NO: 8207 - protein, 113 aa, Artificial Sequence; identical to SEQ ID NO: 6207
  Synthetic

SEQ ID NO: 8208 - protein, 9 aa, Artificial Sequence
  Synthetic
QQYYSTPYT

SEQ ID NO: 8209 - protein, 120 aa, Artificial Sequence; identical to SEQ ID NO: 6209
  Synthetic

SEQ ID NO: 8210 - protein, 13 aa, Artificial Sequence
  Synthetic
AKDSVGIVDYFDY

SEQ ID NO: 8211 - protein, 108 aa, Artificial Sequence; identical to SEQ ID NO: 6211
  Synthetic

SEQ ID NO: 8212 - protein, 10 aa, Artificial Sequence
  Synthetic
QQSYSTPPYT

SEQ ID NO: 8213 - protein, 120 aa, Artificial Sequence; identical to SEQ ID NO: 6213
  Synthetic

SEQ ID NO: 8214 - protein, 13 aa, Artificial Sequence
  Synthetic
ARLSERWYSPFDS

SEQ ID NO: 8215 - protein, 110 aa, Artificial Sequence; identical to SEQ ID NO: 6215
  Synthetic

SEQ ID NO: 8216 - protein, 12 aa, Artificial Sequence
  Synthetic
QQYNNWPPGGFT

SEQ ID NO: 8217 - protein, 130 aa, Artificial Sequence; identical to SEQ ID NO: 6217
  Synthetic

SEQ ID NO: 8218 - protein, 21 aa, Artificial Sequence
  Synthetic
TTDCFWRLRGTSCYEHDAFDI

SEQ ID NO: 8219 - protein, 106 aa, Artificial Sequence; identical to SEQ ID NO: 6219
  Synthetic

SEQ ID NO: 8220 - protein, 8 aa, Artificial Sequence
  Synthetic
QQSYNSLH

SEQ ID NO: 8221 - protein, 124 aa, Artificial Sequence; identical to SEQ ID NO: 6221
  Synthetic

SEQ ID NO: 8222 - protein, 17 aa, Artificial Sequence
  Synthetic
ARVPSSSDYGDYGGFEY

SEQ ID NO: 8223 - protein, 107 aa, Artificial Sequence; identical to SEQ ID NO: 6223
  Synthetic

SEQ ID NO: 8224 - protein, 9 aa, Artificial Sequence
  Synthetic
QQSYSTPCS

SEQ ID NO: 8225 - protein, 123 aa, Artificial Sequence; identical to SEQ ID NO: 6225
  Synthetic

SEQ ID NO: 8226 - protein, 16 aa, Artificial Sequence
  Synthetic
ARDSNVDTVMVTWFDY

SEQ ID NO: 8227 - protein, 108 aa, Artificial Sequence; identical to SEQ ID NO: 6227
  Synthetic

SEQ ID NO: 8228 - protein, 10 aa, Artificial Sequence
  Synthetic
QQSYSTPPWT

SEQ ID NO: 8229 - protein, 125 aa, Artificial Sequence; identical to SEQ ID NO: 6229
  Synthetic

SEQ ID NO: 8230 - protein, 19 aa, Artificial Sequence
  Synthetic
ATTRSELRYFGYNYYGVDV

SEQ ID NO: 8231 - protein, 107 aa, Artificial Sequence; identical to SEQ ID NO: 6231
  Synthetic

SEQ ID NO: 8232 - protein, 9 aa, Artificial Sequence
  Synthetic
LQYNTYPRT

SEQ ID NO: 8233 - protein, 125 aa, Artificial Sequence; identical to SEQ ID NO: 6233
  Synthetic

SEQ ID NO: 8234 - protein, 18 aa, Artificial Sequence
  Synthetic
AKDFFMYYSGWYRYYIDY

SEQ ID NO: 8235 - protein, 107 aa, Artificial Sequence; identical to SEQ ID NO: 6235
  Synthetic

SEQ ID NO: 8236 - protein, 9 aa, Artificial Sequence
  Synthetic
QQYDNLPLT

SEQ ID NO: 8237 - protein, 117 aa, Artificial Sequence; identical to SEQ ID NO: 6237
  Synthetic

SEQ ID NO: 8238 - protein, 11 aa, Artificial Sequence
  Synthetic
ARDRGESGLDV

SEQ ID NO: 8239 - protein, 106 aa, Artificial Sequence; identical to SEQ ID NO: 6239
  Synthetic

SEQ ID NO: 8240 - protein, 8 aa, Artificial Sequence
  Synthetic
QQANSFPL

SEQ ID NO: 8241 - protein, 122 aa, Artificial Sequence; identical to SEQ ID NO: 6241
  Synthetic

SEQ ID NO: 8242 - protein, 15 aa, Artificial Sequence
  Synthetic
ARFGSGWQWLGKTDV

SEQ ID NO: 8243 - protein, 108 aa, Artificial Sequence; identical to SEQ ID NO: 6243
  Synthetic

SEQ ID NO: 8244 - protein, 10 aa, Artificial Sequence
  Synthetic
QQYDNLPQYT

SEQ ID NO: 8245 - protein, 121 aa, Artificial Sequence; identical to SEQ ID NO: 6245
  Synthetic

SEQ ID NO: 8246 - protein, 14 aa, Artificial Sequence
  Synthetic
AKGVEYSSSSNCDY

SEQ ID NO: 8247 - protein, 106 aa, Artificial Sequence; identical to SEQ ID NO: 6247
  Synthetic

SEQ ID NO: 8248 - protein, 9 aa, Artificial Sequence
  Synthetic
QQTNSFPLT

SEQ ID NO: 8249 - protein, 116 aa, Artificial Sequence; identical to SEQ ID NO: 413
  Synthetic

SEQ ID NO: 8250 - protein, 11 aa, Artificial Sequence
  Synthetic
ARRGASWELDY

SEQ ID NO: 8251 - protein, 110 aa, Artificial Sequence; identical to SEQ ID NO: 414
  Synthetic

SEQ ID NO: 8252 - protein, 11 aa, Artificial Sequence
  Synthetic
AAWDDSLNGYV

SEQ ID NO: 8253 - protein, 126 aa, Artificial Sequence; identical to SEQ ID NO: 6253
  Synthetic

SEQ ID NO: 8254 - protein, 19 aa, Artificial Sequence
  Synthetic
ARREPYGPRDYYYFFGMDV

SEQ ID NO: 8255 - protein, 115 aa, Artificial Sequence; identical to SEQ ID NO: 6255
  Synthetic

SEQ ID NO: 8256 - protein, 13 aa, Artificial Sequence
  Synthetic
GADEGSGGTFVGV

SEQ ID NO: 8257 - protein, 120 aa, Artificial Sequence; identical to SEQ ID NO: 6257
  Synthetic

SEQ ID NO: 8258 - protein, 13 aa, Artificial Sequence
  Synthetic
ARAGTTNSDYFDY

SEQ ID NO: 8259 - protein, 108 aa, Artificial Sequence; identical to SEQ ID NO: 6259
  Synthetic

SEQ ID NO: 8260 - protein, 11 aa, Artificial Sequence
  Synthetic
QVWDSSSVLWV

SEQ ID NO: 8261 - protein, 122 aa, Artificial Sequence; identical to SEQ ID NO: 6261
  Synthetic

SEQ ID NO: 8262 - protein, 15 aa, Artificial Sequence
  Synthetic
ARDPPNDILTGYLDH

SEQ ID NO: 8263 - protein, 109 aa, Artificial Sequence; identical to SEQ ID NO: 6263
  Synthetic

SEQ ID NO: 8264 - protein, 12 aa, Artificial Sequence
  Synthetic
QVWDGSSDRHWV

SEQ ID NO: 8265 - protein, 119 aa, Artificial Sequence; identical to SEQ ID NO: 6265
  Synthetic

SEQ ID NO: 8266 - protein, 12 aa, Artificial Sequence
  Synthetic
ARGFSLTWYFDL

SEQ ID NO: 8267 - protein, 110 aa, Artificial Sequence; identical to SEQ ID NO: 6267
  Synthetic

SEQ ID NO: 8268 - protein, 13 aa, Artificial Sequence
  Synthetic
QLWDSTSDHPDVV

SEQ ID NO: 8269 - protein, 119 aa, Artificial Sequence; identical to SEQ ID NO: 6269
  Synthetic

SEQ ID NO: 8270 - protein, 12 aa, Artificial Sequence
  Synthetic
AREGSLTGYFDL

SEQ ID NO: 8271 - protein, 109 aa, Artificial Sequence; identical to SEQ ID NO: 6271
  Synthetic

SEQ ID NO: 8272 - protein, 12 aa, Artificial Sequence
  Synthetic
QVWDSSSDRHVV

SEQ ID NO: 8273 - protein, 120 aa, Artificial Sequence; identical to SEQ ID NO: 6273
  Synthetic

SEQ ID NO: 8274 - protein, 13 aa, Artificial Sequence
  Synthetic
TRVQVGARGWADY

SEQ ID NO: 8275 - protein, 110 aa, Artificial Sequence; identical to SEQ ID NO: 6275
  Synthetic

SEQ ID NO: 8276 - protein, 9 aa, Artificial Sequence
  Synthetic
QSCDTINWV

SEQ ID NO: 8277 - protein, 129 aa, Artificial Sequence; identical to SEQ ID NO: 6277
  Synthetic

SEQ ID NO: 8278 - protein, 22 aa, Artificial Sequence
  Synthetic
ARGGRPDHETGIAVLGEYYFDS

SEQ ID NO: 8279 - protein, 106 aa, Artificial Sequence; identical to SEQ ID NO: 6279
  Synthetic

SEQ ID NO: 8280 - protein, 9 aa, Artificial Sequence
  Synthetic
QSADTNGVV

SEQ ID NO: 8281 - protein, 124 aa, Artificial Sequence; identical to SEQ ID NO: 6281
  Synthetic

SEQ ID NO: 8282 - protein, 17 aa, Artificial Sequence
  Synthetic
ARDQNQIDPAYRDAFDI

SEQ ID NO: 8283 - protein, 110 aa, Artificial Sequence; identical to SEQ ID NO: 6283
  Synthetic

SEQ ID NO: 8284 - protein, 10 aa, Artificial Sequence
  Synthetic
CSYAGSSSWV

SEQ ID NO: 8285 - protein, 118 aa, Artificial Sequence; identical to SEQ ID NO: 6285
  Synthetic

SEQ ID NO: 8286 - protein, 12 aa, Artificial Sequence
  Synthetic
ARVQDLMYSLLY

SEQ ID NO: 8287 - protein, 110 aa, Artificial Sequence; identical to SEQ ID NO: 6287
  Synthetic

SEQ ID NO: 8288 - protein, 13 aa, Artificial Sequence
  Synthetic
QVWDSTSDHPGVV

SEQ ID NO: 8289 - protein, 128 aa, Artificial Sequence; identical to SEQ ID NO: 6289
  Synthetic

SEQ ID NO: 8290 - protein, 21 aa, Artificial Sequence
  Synthetic
ARTPAPLRHVENYYYYYGLDV

SEQ ID NO: 8291 - protein, 111 aa, Artificial Sequence; identical to SEQ ID NO: 6291
  Synthetic

SEQ ID NO: 8292 - protein, 11 aa, Artificial Sequence
  Synthetic
SSYTRGTTLVL

SEQ ID NO: 8293 - protein, 122 aa, Artificial Sequence; identical to SEQ ID NO: 6293
  Synthetic

SEQ ID NO: 8294 - protein, 14 aa, Artificial Sequence
  Synthetic
ARFLRNFEWLFFDP

SEQ ID NO: 8295 - protein, 109 aa, Artificial Sequence; identical to SEQ ID NO: 6295
  Synthetic

SEQ ID NO: 8296 - protein, 9 aa, Artificial Sequence
  Synthetic
SSYVGSNVL

SEQ ID NO: 8297 - protein, 123 aa, Artificial Sequence; identical to SEQ ID NO: 6297
  Synthetic

SEQ ID NO: 8298 - protein, 17 aa, Artificial Sequence
  Synthetic
ARGWPYCGVDCYSGFDY

SEQ ID NO: 8299 - protein, 111 aa, Artificial Sequence; identical to SEQ ID NO: 6299
  Synthetic

SEQ ID NO: 8300 - protein, 12 aa, Artificial Sequence
  Synthetic
AAWDDSLNGLWV

SEQ ID NO: 8301 - protein, 124 aa, Artificial Sequence; identical to SEQ ID NO: 6301
  Synthetic

SEQ ID NO: 8302 - protein, 17 aa, Artificial Sequence
  Synthetic
ARGRSRGVGDVYPSVDY

SEQ ID NO: 8303 - protein, 110 aa, Artificial Sequence; identical to SEQ ID NO: 6303
  Synthetic

SEQ ID NO: 8304 - protein, 11 aa, Artificial Sequence
  Synthetic
AAWDDSLNGPV

SEQ ID NO: 8305 - protein, 122 aa, Artificial Sequence; identical to SEQ ID NO: 6305
  Synthetic

SEQ ID NO: 8306 - protein, 14 aa, Artificial Sequence
  Synthetic
ARQHRYGSGSSELL

SEQ ID NO: 8307 - protein, 110 aa, Artificial Sequence; identical to SEQ ID NO: 6307
  Synthetic

SEQ ID NO: 8308 - protein, 10 aa, Artificial Sequence
  Synthetic
SSYAGSSNLI

SEQ ID NO: 8309 - protein, 120 aa, Artificial Sequence; identical to SEQ ID NO: 6309
  Synthetic

SEQ ID NO: 8310 - protein, 13 aa, Artificial Sequence
  Synthetic
ARRGGDYPPWFDP

SEQ ID NO: 8311 - protein, 110 aa, Artificial Sequence; identical to SEQ ID NO: 6311
  Synthetic

SEQ ID NO: 8312 - protein, 10 aa, Artificial Sequence
  Synthetic
CSYADSYTVI

SEQ ID NO: 8313 - protein, 122 aa, Artificial Sequence; identical to SEQ ID NO: 6313
  Synthetic

SEQ ID NO: 8314 - protein, 14 aa, Artificial Sequence
  Synthetic
ARQNRFGSGSSELL

SEQ ID NO: 8315 - protein, 110 aa, Artificial Sequence; identical to SEQ ID NO: 6315
  Synthetic

SEQ ID NO: 8316 - protein, 10 aa, Artificial Sequence
  Synthetic
SSYAGSNNLI

SEQ ID NO: 8317 - protein, 132 aa, Artificial Sequence; identical to SEQ ID NO: 6317
  Synthetic

SEQ ID NO: 8318 - protein, 25 aa, Artificial Sequence
  Synthetic
ARVYHLLLGEGSWSPLPYYYYGMDV

SEQ ID NO: 8319 - protein, 110 aa, Artificial Sequence; identical to SEQ ID NO: 6319
  Synthetic

SEQ ID NO: 8320 - protein, 10 aa, Artificial Sequence
  Synthetic
CSYAGSNTFV

SEQ ID NO: 8321 - protein, 129 aa, Artificial Sequence; identical to SEQ ID NO: 6321
  Synthetic

SEQ ID NO: 8322 - protein, 21 aa, Artificial Sequence
  Synthetic
SRGGYYDGSPYYWNRPDAFDI

SEQ ID NO: 8323 - protein, 112 aa, Artificial Sequence; identical to SEQ ID NO: 6323
  Synthetic

SEQ ID NO: 8324 - protein, 13 aa, Artificial Sequence
  Synthetic
AAWDDSLNGPDVV

SEQ ID NO: 8325 - protein, 130 aa, Artificial Sequence; identical to SEQ ID NO: 6325
  Synthetic

SEQ ID NO: 8326 - protein, 21 aa, Artificial Sequence
  Synthetic
TRGGYYDGSGFYWNRPDAFDI

SEQ ID NO: 8327 - protein, 112 aa, Artificial Sequence; identical to SEQ ID NO: 6327
  Synthetic

SEQ ID NO: 8328 - protein, 13 aa, Artificial Sequence
  Synthetic
AAWDDSLNGPDVV

SEQ ID NO: 8329 - protein, 122 aa, Artificial Sequence; identical to SEQ ID NO: 6329
  Synthetic

SEQ ID NO: 8330 - protein, 14 aa, Artificial Sequence
  Synthetic
ARQNRYGSGSSELL

SEQ ID NO: 8331 - protein, 110 aa, Artificial Sequence; identical to SEQ ID NO: 6331
  Synthetic

SEQ ID NO: 8332 - protein, 10 aa, Artificial Sequence
  Synthetic
SSYAGSNSLV

SEQ ID NO: 8333 - protein, 126 aa, Artificial Sequence; identical to SEQ ID NO: 6333
  Synthetic

SEQ ID NO: 8334 - protein, 19 aa, Artificial Sequence
  Synthetic
ARHMVVIPVGLHYYYGMDV

SEQ ID NO: 8335 - protein, 111 aa, Artificial Sequence; identical to SEQ ID NO: 6335
  Synthetic

SEQ ID NO: 8336 - protein, 11 aa, Artificial Sequence
  Synthetic
QSYDSGLSASV

SEQ ID NO: 8337 - protein, 124 aa, Artificial Sequence; identical to SEQ ID NO: 6337
  Synthetic

SEQ ID NO: 8338 - protein, 17 aa, Artificial Sequence
  Synthetic
ARERGYSDYGSVQYFDY

SEQ ID NO: 8339 - protein, 114 aa, Artificial Sequence; identical to SEQ ID NO: 6339
  Synthetic

SEQ ID NO: 8340 - protein, 12 aa, Artificial Sequence
  Synthetic
QSYDSSLSGSVV

SEQ ID NO: 8341 - protein, 126 aa, Artificial Sequence; identical to SEQ ID NO: 6341
  Synthetic

SEQ ID NO: 8342 - protein, 19 aa, Artificial Sequence
  Synthetic
ARGGYCGSTSCSPDDYFDY

SEQ ID NO: 8343 - protein, 109 aa, Artificial Sequence; identical to SEQ ID NO: 6343
  Synthetic

SEQ ID NO: 8344 - protein, 12 aa, Artificial Sequence
  Synthetic
QVWDSSSDHYYV

SEQ ID NO: 8345 - protein, 124 aa, Artificial Sequence; identical to SEQ ID NO: 6345
  Synthetic

SEQ ID NO: 8346 - protein, 17 aa, Artificial Sequence
  Synthetic
ARDGAVAPAGSLDWFDP

SEQ ID NO: 8347 - protein, 108 aa, Artificial Sequence; identical to SEQ ID NO: 6347
  Synthetic

SEQ ID NO: 8348 - protein, 11 aa, Artificial Sequence
  Synthetic
QVWDSSGDHYV

SEQ ID NO: 8349 - protein, 120 aa, Artificial Sequence; identical to SEQ ID NO: 6349
  Synthetic

SEQ ID NO: 8350 - protein, 12 aa, Artificial Sequence
  Synthetic
ASRGWLRGAFDV

SEQ ID NO: 8351 - protein, 111 aa, Artificial Sequence; identical to SEQ ID NO: 6351
  Synthetic

SEQ ID NO: 8352 - protein, 10 aa, Artificial Sequence
  Synthetic
QSYDSSIHVV

SEQ ID NO: 8353 - protein, 123 aa, Artificial Sequence; identical to SEQ ID NO: 417
  Synthetic

SEQ ID NO: 8354 - protein, 16 aa, Artificial Sequence
  Synthetic
AKAASRSTRIGGAFDI

SEQ ID NO: 8355 - protein, 109 aa, Artificial Sequence; identical to SEQ ID NO: 6355
  Synthetic

SEQ ID NO: 8356 - protein, 10 aa, Artificial Sequence
  Synthetic
CSYAYSFTNV

SEQ ID NO: 8357 - protein, 122 aa, Artificial Sequence; identical to SEQ ID NO: 6357
  Synthetic

SEQ ID NO: 8358 - protein, 16 aa, Artificial Sequence
  Synthetic
AKTPRGDYDSSGTSAY

SEQ ID NO: 8359 - protein, 112 aa, Artificial Sequence; identical to SEQ ID NO: 6359
  Synthetic

SEQ ID NO: 8360 - protein, 10 aa, Artificial Sequence
  Synthetic
QTWGIGSDWV

SEQ ID NO: 8361 - protein, 123 aa, Artificial Sequence; identical to SEQ ID NO: 6361
  Synthetic

SEQ ID NO: 8362 - protein, 14 aa, Artificial Sequence
  Synthetic
TTDDPGSYYYGMDV

SEQ ID NO: 8363 - protein, 109 aa, Artificial Sequence; identical to SEQ ID NO: 6363
  Synthetic

SEQ ID NO: 8364 - protein, 9 aa, Artificial Sequence
  Synthetic
LLSYSGARV

SEQ ID NO: 8365 - protein, 129 aa, Artificial Sequence; identical to SEQ ID NO: 6365
  Synthetic

SEQ ID NO: 8366 - protein, 22 aa, Artificial Sequence
  Synthetic
AKDVSKTGWFGEIANREYYFDY

SEQ ID NO: 8367 - protein, 106 aa, Artificial Sequence; identical to SEQ ID NO: 6367
  Synthetic

SEQ ID NO: 8368 - protein, 9 aa, Artificial Sequence
  Synthetic
QLADSSGVV

SEQ ID NO: 8369 - protein, 130 aa, Artificial Sequence; identical to SEQ ID NO: 6369
  Synthetic

SEQ ID NO: 8370 - protein, 23 aa, Artificial Sequence
  Synthetic
AKIADLVGAYDFRSGQHFAAFDV

SEQ ID NO: 8371 - protein, 108 aa, Artificial Sequence; identical to SEQ ID NO: 6371
  Synthetic

SEQ ID NO: 8372 - protein, 9 aa, Artificial Sequence
  Synthetic
ASWDDSLVV

SEQ ID NO: 8373 - protein, 122 aa, Artificial Sequence; identical to SEQ ID NO: 6373
  Synthetic

SEQ ID NO: 8374 - protein, 14 aa, Artificial Sequence
  Synthetic
ARTDYDILTGYYVY

SEQ ID NO: 8375 - protein, 109 aa, Artificial Sequence; identical to SEQ ID NO: 6375
  Synthetic

SEQ ID NO: 8376 - protein, 12 aa, Artificial Sequence
  Synthetic
QVWDGSSDHFYV

SEQ ID NO: 8377 - protein, 118 aa, Artificial Sequence; identical to SEQ ID NO: 6377
  Synthetic

SEQ ID NO: 8378 - protein, 12 aa, Artificial Sequence
  Synthetic
ARTQWLRGSFDL

SEQ ID NO: 8379 - protein, 111 aa, Artificial Sequence; identical to SEQ ID NO: 6379
  Synthetic

SEQ ID NO: 8380 - protein, 10 aa, Artificial Sequence
  Synthetic
QSYDVSNHWV

SEQ ID NO: 8381 - protein, 130 aa, Artificial Sequence; identical to SEQ ID NO: 6381
  Synthetic

SEQ ID NO: 8382 - protein, 23 aa, Artificial Sequence
  Synthetic
VKDLYYLGKRRSSVIFEVYGMDV

SEQ ID NO: 8383 - protein, 108 aa, Artificial Sequence; identical to SEQ ID NO: 6383
  Synthetic

SEQ ID NO: 8384 - protein, 11 aa, Artificial Sequence
  Synthetic
QVWDSNSDLVV

SEQ ID NO: 8385 - protein, 122 aa, Artificial Sequence; identical to SEQ ID NO: 6385
  Synthetic

SEQ ID NO: 8386 - protein, 14 aa, Artificial Sequence
  Synthetic
ARGDYESLTGYYDY

SEQ ID NO: 8387 - protein, 109 aa, Artificial Sequence; identical to SEQ ID NO: 6387
  Synthetic

SEQ ID NO: 8388 - protein, 12 aa, Artificial Sequence
  Synthetic
QVWDGSSDHFYV

SEQ ID NO: 8389 - protein, 122 aa, Artificial Sequence; identical to SEQ ID NO: 6389
  Synthetic

SEQ ID NO: 8390 - protein, 15 aa, Artificial Sequence
  Synthetic
ARDIVFVPAAMGPDY

SEQ ID NO: 8391 - protein, 109 aa, Artificial Sequence; identical to SEQ ID NO: 6391
  Synthetic

SEQ ID NO: 8392 - protein, 11 aa, Artificial Sequence
  Synthetic
QHYNNWPPALT

SEQ ID NO: 8393 - protein, 123 aa, Artificial Sequence; identical to SEQ ID NO: 355
  Synthetic

SEQ ID NO: 8394 - protein, 16 aa, Artificial Sequence
  Synthetic
AKGSGSQLYYYYGMDV

SEQ ID NO: 8395 - protein, 108 aa, Artificial Sequence; identical to SEQ ID NO: 356
  Synthetic

SEQ ID NO: 8396 - protein, 10 aa, Artificial Sequence
  Synthetic
QQSYSTPHSS

SEQ ID NO: 8397 - protein, 121 aa, Artificial Sequence; identical to SEQ ID NO: 319
  Synthetic

SEQ ID NO: 8398 - protein, 14 aa, Artificial Sequence
  Synthetic
ARDKRGVIRGLLNF

SEQ ID NO: 8399 - protein, 112 aa, Artificial Sequence; identical to SEQ ID NO: 6399
  Synthetic

SEQ ID NO: 8400 - protein, 9 aa, Artificial Sequence
  Synthetic
QQYYNTPHT

SEQ ID NO: 8401 - protein, 119 aa, Artificial Sequence; identical to SEQ ID NO: 313
  Synthetic

SEQ ID NO: 8402 - protein, 12 aa, Artificial Sequence
  Synthetic
ARDGGAYDRFDY

SEQ ID NO: 8403 - protein, 107 aa, Artificial Sequence; identical to SEQ ID NO: 6403
  Synthetic

SEQ ID NO: 8404 - protein, 9 aa, Artificial Sequence
  Synthetic
QQYDNLPLT

SEQ ID NO: 8405 - protein, 120 aa, Artificial Sequence; identical to SEQ ID NO: 317
  Synthetic

SEQ ID NO: 8406 - protein, 13 aa, Artificial Sequence
  Synthetic
AKSWWLSENWFDP

SEQ ID NO: 8407 - protein, 107 aa, Artificial Sequence; identical to SEQ ID NO: 318
  Synthetic

SEQ ID NO: 8408 - protein, 9 aa, Artificial Sequence
  Synthetic
QQYNNWPLT

SEQ ID NO: 8409 - protein, 127 aa, Artificial Sequence; identical to SEQ ID NO: 6409
  Synthetic

SEQ ID NO: 8410 - protein, 20 aa, Artificial Sequence
  Synthetic
AKNAGLYCSGGSCYSGIFDY

SEQ ID NO: 8411 - protein, 106 aa, Artificial Sequence; identical to SEQ ID NO: 6411
  Synthetic

SEQ ID NO: 8412 - protein, 10 aa, Artificial Sequence
  Synthetic
QQYNNLPPIT

SEQ ID NO: 8413 - protein, 121 aa, Artificial Sequence; identical to SEQ ID NO: 6413
  Synthetic

SEQ ID NO: 8414 - protein, 14 aa, Artificial Sequence
  Synthetic
ATERPFGLVPVFDY

SEQ ID NO: 8415 - protein, 108 aa, Artificial Sequence; identical to SEQ ID NO: 6415
  Synthetic

SEQ ID NO: 8416 - protein, 10 aa, Artificial Sequence
  Synthetic
QQSYSTLALT

SEQ ID NO: 8417 - protein, 118 aa, Artificial Sequence; identical to SEQ ID NO: 6417
  Synthetic

SEQ ID NO: 8418 - protein, 11 aa, Artificial Sequence
  Synthetic
ARVDGNYVQDS

SEQ ID NO: 8419 - protein, 109 aa, Artificial Sequence; identical to SEQ ID NO: 6419
  Synthetic

SEQ ID NO: 8420 - protein, 11 aa, Artificial Sequence
  Synthetic
QYYDNWPPIFT

SEQ ID NO: 8421 - protein, 122 aa, Artificial Sequence; identical to SEQ ID NO: 309
  Synthetic

SEQ ID NO: 8422 - protein, 14 aa, Artificial Sequence
  Synthetic
ARHFADGSGRVVDY

SEQ ID NO: 8423 - protein, 108 aa, Artificial Sequence; identical to SEQ ID NO: 310
  Synthetic

SEQ ID NO: 8424 - protein, 10 aa, Artificial Sequence
  Synthetic
QQRSNWPLYT

SEQ ID NO: 8425 - protein, 125 aa, Artificial Sequence; identical to SEQ ID NO: 6425
  Synthetic

SEQ ID NO: 8426 - protein, 18 aa, Artificial Sequence
  Synthetic
ARGGPYGSGTYYPYYFDY

SEQ ID NO: 8427 - protein, 113 aa, Artificial Sequence; identical to SEQ ID NO: 6427
  Synthetic
  misc_feature (27)..(27): Xaa can be any naturally occurring amino acid

SEQ ID NO: 8428 - protein, 9 aa, Artificial Sequence
  Synthetic
QQYYSTPWT

SEQ ID NO: 8429 - protein, 123 aa, Artificial Sequence; identical to SEQ ID NO: 6429
  Synthetic

SEQ ID NO: 8430 - protein, 16 aa, Artificial Sequence
  Synthetic
AKDSEDCSSTSCYVDS

SEQ ID NO: 8431 - protein, 113 aa, Artificial Sequence; identical to SEQ ID NO: 6431
  Synthetic
  misc_feature (15)..(15): Xaa can be any naturally occurring amino acid

SEQ ID NO: 8432 - protein, 9 aa, Artificial Sequence
  Synthetic
QQYYNTPYT

SEQ ID NO: 8433 - protein, 123 aa, Artificial Sequence; identical to SEQ ID NO: 275
  Synthetic

SEQ ID NO: 8434 - protein, 17 aa, Artificial Sequence
  Synthetic
ARKPLLHSNISPGAFDI

SEQ ID NO: 8435 - protein, 107 aa, Artificial Sequence; identical to SEQ ID NO: 6435
  Synthetic

SEQ ID NO: 8436 - protein, 9 aa, Artificial Sequence
  Synthetic
QQYTNTPRT

SEQ ID NO: 8437 - protein, 122 aa, Artificial Sequence; identical to SEQ ID NO: 6437
  Synthetic

SEQ ID NO: 8438 - protein, 15 aa, Artificial Sequence
  Synthetic
ARDLVLIPADDAFDI

SEQ ID NO: 8439 - protein, 107 aa, Artificial Sequence; identical to SEQ ID NO: 6439
  Synthetic

SEQ ID NO: 8440 - protein, 9 aa, Artificial Sequence
  Synthetic
QQSYSTPWT

SEQ ID NO: 8441 - protein, 121 aa, Artificial Sequence; identical to SEQ ID NO: 319
  Synthetic

SEQ ID NO: 8442 - protein, 14 aa, Artificial Sequence
  Synthetic
ARDKRGVIRGLLNF

SEQ ID NO: 8443 - protein, 112 aa, Artificial Sequence; identical to SEQ ID NO: 6443
  Synthetic
  misc_feature (15)..(15): Xaa can be any naturally occurring amino acid

SEQ ID NO: 8444 - protein, 9 aa, Artificial Sequence
  Synthetic
QQYYNTPHT

SEQ ID NO: 8445 - protein, 130 aa, Artificial Sequence; identical to SEQ ID NO: 6445
  Synthetic

SEQ ID NO: 8446 - protein, 21 aa, Artificial Sequence
  Synthetic
ATDDPGDPGADSSYYYYYMDV

SEQ ID NO: 8447 - protein, 107 aa, Artificial Sequence; identical to SEQ ID NO: 6447
  Synthetic

SEQ ID NO: 8448 - protein, 9 aa, Artificial Sequence
  Synthetic
QQRNYLPFT

SEQ ID NO: 8449 - protein, 120 aa, Artificial Sequence; identical to SEQ ID NO: 6449
  Synthetic

SEQ ID NO: 8450 - protein, 13 aa, Artificial Sequence
  Synthetic
ASLITLIRAVPDL

SEQ ID NO: 8451 - protein, 107 aa, Artificial Sequence; identical to SEQ ID NO: 6451
  Synthetic

SEQ ID NO: 8452 - protein, 9 aa, Artificial Sequence
  Synthetic
QQSYSTPRT

SEQ ID NO: 8453 - protein, 125 aa, Artificial Sequence; identical to SEQ ID NO: 337
  Synthetic

SEQ ID NO: 8454 - protein, 18 aa, Artificial Sequence
  Synthetic
ARDFSNSDMVTLSDAFDI

SEQ ID NO: 8455 - protein, 111 aa, Artificial Sequence; identical to SEQ ID NO: 338
  Synthetic

SEQ ID NO: 8456 - protein, 10 aa, Artificial Sequence
  Synthetic
QQLNSYPLFT

SEQ ID NO: 8457 - protein, 121 aa, Artificial Sequence; identical to SEQ ID NO: 6457
  Synthetic

SEQ ID NO: 8458 - protein, 14 aa, Artificial Sequence
  Synthetic
ARVSRGVNALDLDY

SEQ ID NO: 8459 - protein, 108 aa, Artificial Sequence; identical to SEQ ID NO: 6459
  Synthetic

SEQ ID NO: 8460 - protein, 10 aa, Artificial Sequence
  Synthetic
QQRSNWPPWT

SEQ ID NO: 8461 - protein, 124 aa, Artificial Sequence; identical to SEQ ID NO: 6461
  Synthetic

SEQ ID NO: 8462 - protein, 17 aa, Artificial Sequence
  Synthetic
ATVSFDWLVDELDAFDV

SEQ ID NO: 8463 - protein, 110 aa, Artificial Sequence; identical to SEQ ID NO: 6463
  Synthetic

SEQ ID NO: 8464 - protein, 11 aa, Artificial Sequence
  Synthetic
QQYGGSPPRVI

SEQ ID NO: 8465 - protein, 127 aa, Artificial Sequence; identical to SEQ ID NO: 6465
  Synthetic

SEQ ID NO: 8466 - protein, 20 aa, Artificial Sequence
  Synthetic
AKVTSPYCSGTNCYTGYFDY

SEQ ID NO: 8467 - protein, 106 aa, Artificial Sequence; identical to SEQ ID NO: 6467
  Synthetic
  misc_feature (10)..(10): Xaa can be any naturally occurring amino acid

SEQ ID NO: 8468 - protein, 8 aa, Artificial Sequence
  Synthetic
QQYNSYST

SEQ ID NO: 8469 - protein, 117 aa, Artificial Sequence; identical to SEQ ID NO: 6469
  Synthetic

SEQ ID NO: 8470 - protein, 11 aa, Artificial Sequence
  Synthetic
ARAFGGDYFDY

SEQ ID NO: 8471 - protein, 109 aa, Artificial Sequence; identical to SEQ ID NO: 6471
  Synthetic

SEQ ID NO: 8472 - protein, 10 aa, Artificial Sequence
  Synthetic
QQYGSSPSLT

SEQ ID NO: 8473 - protein, 120 aa, Artificial Sequence; identical to SEQ ID NO: 6473
  Synthetic

SEQ ID NO: 8474 - protein, 13 aa, Artificial Sequence
  Synthetic
AKMHYYYGSASPH

SEQ ID NO: 8475 - protein, 107 aa, Artificial Sequence; identical to SEQ ID NO: 6475
  Synthetic

SEQ ID NO: 8476 - protein, 9 aa, Artificial Sequence
  Synthetic
QQYENLLIS

SEQ ID NO: 8477 - protein, 120 aa, Artificial Sequence; identical to SEQ ID NO: 279
  Synthetic

SEQ ID NO: 8478 - protein, 11 aa, Artificial Sequence
  Synthetic
TRWDGWSQHDY

SEQ ID NO: 8479 - protein, 111 aa, Artificial Sequence; identical to SEQ ID NO: 280
  Synthetic

SEQ ID NO: 8480 - protein, 9 aa, Artificial Sequence
  Synthetic
MQVLQIPYT

SEQ ID NO: 8481 - protein, 122 aa, Artificial Sequence; identical to SEQ ID NO: 301
  Synthetic

SEQ ID NO: 8482 - protein, 16 aa, Artificial Sequence
  Synthetic
ARVRFDTSGYFWSLDY

SEQ ID NO: 8483 - protein, 108 aa, Artificial Sequence; identical to SEQ ID NO: 6483
  Synthetic

SEQ ID NO: 8484 - protein, 10 aa, Artificial Sequence
  Synthetic
QQSYSNPQYT

SEQ ID NO: 8485 - protein, 122 aa, Artificial Sequence; identical to SEQ ID NO: 6485
  Synthetic

SEQ ID NO: 8486 - protein, 15 aa, Artificial Sequence
  Synthetic
ARGGLIPATGDAFDI

SEQ ID NO: 8487 - protein, 110 aa, Artificial Sequence; identical to SEQ ID NO: 6487
  Synthetic

SEQ ID NO: 8488 - protein, 12 aa, Artificial Sequence
  Synthetic
QQYKSWPELMYT

SEQ ID NO: 8489 - protein, 123 aa, Artificial Sequence; identical to SEQ ID NO: 6489
  Synthetic

SEQ ID NO: 8490 - protein, 16 aa, Artificial Sequence
  Synthetic
AKDSEDCSSTSCYVDH

SEQ ID NO: 8491 - protein, 113 aa, Artificial Sequence; identical to SEQ ID NO: 294
  Synthetic

SEQ ID NO: 8492 - protein, 9 aa, Artificial Sequence
  Synthetic
QQYYNTPYT

SEQ ID NO: 8493 - protein, 121 aa, Artificial Sequence; identical to SEQ ID NO: 6493
  Synthetic

SEQ ID NO: 8494 - protein, 14 aa, Artificial Sequence
  Synthetic
AKDSLGLLVPVFDY

SEQ ID NO: 8495 - protein, 108 aa, Artificial Sequence; identical to SEQ ID NO: 6495
  Synthetic

SEQ ID NO: 8496 - protein, 10 aa, Artificial Sequence
  Synthetic
QQSYTTLALT

SEQ ID NO: 8497 - protein, 129 aa, Artificial Sequence; identical to SEQ ID NO: 6497
  Synthetic

SEQ ID NO: 8498 - protein, 22 aa, Artificial Sequence
  Synthetic
AKDHSTVSGAFGELLGSGPVDP

SEQ ID NO: 8499 - protein, 109 aa, Artificial Sequence; identical to SEQ ID NO: 6499
  Synthetic

SEQ ID NO: 8500 - protein, 11 aa, Artificial Sequence
  Synthetic
QEYDRWPRGYT

SEQ ID NO: 8501 - protein, 122 aa, Artificial Sequence; identical to SEQ ID NO: 359
  Synthetic

SEQ ID NO: 8502 - protein, 15 aa, Artificial Sequence
  Synthetic
ARDLVFVPATSAMDV

SEQ ID NO: 8503 - protein, 107 aa, Artificial Sequence; identical to SEQ ID NO: 360
  Synthetic

SEQ ID NO: 8504 - protein, 9 aa, Artificial Sequence
  Synthetic
QQRSNWLFT

SEQ ID NO: 8505 - protein, 122 aa, Artificial Sequence; identical to SEQ ID NO: 363
  Synthetic

SEQ ID NO: 8506 - protein, 16 aa, Artificial Sequence
  Synthetic
ARANYDSSGYHNWFDP

SEQ ID NO: 8507 - protein, 107 aa, Artificial Sequence; identical to SEQ ID NO: 364
  Synthetic

SEQ ID NO: 8508 - protein, 10 aa, Artificial Sequence
  Synthetic
QQSYSMPSWT

SEQ ID NO: 8509 - protein, 117 aa, Artificial Sequence; identical to SEQ ID NO: 341
  Synthetic

SEQ ID NO: 8510 - protein, 11 aa, Artificial Sequence
  Synthetic
ARDLGTGLFDY

SEQ ID NO: 8511 - protein, 108 aa, Artificial Sequence; identical to SEQ ID NO: 342
  Synthetic

SEQ ID NO: 8512 - protein, 10 aa, Artificial Sequence
  Synthetic
QLLNSNPPGT

SEQ ID NO: 8513 - protein, 119 aa, Artificial Sequence; identical to SEQ ID NO: 6513
  Synthetic

SEQ ID NO: 8514 - protein, 13 aa, Artificial Sequence
  Synthetic
ARSDGYQWAYFDL

SEQ ID NO: 8515 - protein, 107 aa, Artificial Sequence; identical to SEQ ID NO: 6515
  Synthetic

SEQ ID NO: 8516 - protein, 9 aa, Artificial Sequence
  Synthetic
QQYASYSLT

SEQ ID NO: 8517 - protein, 120 aa, Artificial Sequence; identical to SEQ ID NO: 6517
  Synthetic

SEQ ID NO: 8518 - protein, 13 aa, Artificial Sequence
  Synthetic
ARGDSGAWPHFDF

SEQ ID NO: 8519 - protein, 108 aa, Artificial Sequence; identical to SEQ ID NO: 6519
  Synthetic

SEQ ID NO: 8520 - protein, 10 aa, Artificial Sequence
  Synthetic
QQYDTWPPLT

SEQ ID NO: 8521 - protein, 122 aa, Artificial Sequence; identical to SEQ ID NO: 291
  Synthetic

SEQ ID NO: 8522 - protein, 15 aa, Artificial Sequence
  Synthetic
ARDLENVMIEVALES

SEQ ID NO: 8523 - protein, 108 aa, Artificial Sequence; identical to SEQ ID NO: 292
  Synthetic

SEQ ID NO: 8524 - protein, 10 aa, Artificial Sequence
  Synthetic
QQSYTTLALT

SEQ ID NO: 8525 - protein, 128 aa, Artificial Sequence; identical to SEQ ID NO: 6525
  Synthetic

SEQ ID NO: 8526 - protein, 22 aa, Artificial Sequence
  Synthetic
ARGQLERRPRCTAGCYYYAMDV

SEQ ID NO: 8527 - protein, 113 aa, Artificial Sequence; identical to SEQ ID NO: 6527
  Synthetic

SEQ ID NO: 8528 - protein, 10 aa, Artificial Sequence
  Synthetic
MQALQTPMYT

SEQ ID NO: 8529 - protein, 117 aa, Artificial Sequence; identical to SEQ ID NO: 6529
  Synthetic

SEQ ID NO: 8530 - protein, 11 aa, Artificial Sequence
  Synthetic
ARDYGDFYFDY

SEQ ID NO: 8531 - protein, 108 aa, Artificial Sequence; identical to SEQ ID NO: 274
  Synthetic

SEQ ID NO: 8532 - protein, 9 aa, Artificial Sequence
  Synthetic
QQYGSSPRT

SEQ ID NO: 8533 - protein, 122 aa, Artificial Sequence; identical to SEQ ID NO: 281
  Synthetic

SEQ ID NO: 8534 - protein, 16 aa, Artificial Sequence
  Synthetic
ASYYNDTSGYSYGLDV

SEQ ID NO: 8535 - protein, 107 aa, Artificial Sequence; identical to SEQ ID NO: 6535
  Synthetic

SEQ ID NO: 8536 - protein, 9 aa, Artificial Sequence
  Synthetic
QQSYSTPQT

SEQ ID NO: 8537 - protein, 126 aa, Artificial Sequence; identical to SEQ ID NO: 6537
  Synthetic

SEQ ID NO: 8538 - protein, 19 aa, Artificial Sequence
  Synthetic
AKKGAPYCGVDCRRGYLDY

SEQ ID NO: 8539 - protein, 107 aa, Artificial Sequence; identical to SEQ ID NO: 6539
  Synthetic

SEQ ID NO: 8540 - protein, 9 aa, Artificial Sequence
  Synthetic
QQYDNLPLT

SEQ ID NO: 8541 - protein, 124 aa, Artificial Sequence; identical to SEQ ID NO: 6541
  Synthetic

SEQ ID NO: 8542 - protein, 17 aa, Artificial Sequence
  Synthetic
AKGSYYDILTGYYGLDY

SEQ ID NO: 8543 - protein, 112 aa, Artificial Sequence; identical to SEQ ID NO: 6543
  Synthetic

SEQ ID NO: 8544 - protein, 9 aa, Artificial Sequence
  Synthetic
MQPLQTPYT

SEQ ID NO: 8545 - protein, 129 aa, Artificial Sequence; identical to SEQ ID NO: 345
  Synthetic

SEQ ID NO: 8546 - protein, 22 aa, Artificial Sequence
  Synthetic
ASGLLWFETAGGSGAPDYGMAV

SEQ ID NO: 8547 - protein, 107 aa, Artificial Sequence; identical to SEQ ID NO: 346
  Synthetic

SEQ ID NO: 8548 - protein, 9 aa, Artificial Sequence
  Synthetic
QQSYNTPLT

SEQ ID NO: 8549 - protein, 124 aa, Artificial Sequence; identical to SEQ ID NO: 6549
  Synthetic

SEQ ID NO: 8550 - protein, 18 aa, Artificial Sequence
  Synthetic
VRGTVTSLGAVWYYYMDV

SEQ ID NO: 8551 - protein, 108 aa, Artificial Sequence; identical to SEQ ID NO: 6551
  Synthetic

SEQ ID NO: 8552 - protein, 10 aa, Artificial Sequence
  Synthetic
QQSYIMPPYT

SEQ ID NO: 8553 - protein, 127 aa, Artificial Sequence; identical to SEQ ID NO: 6553
  Synthetic

SEQ ID NO: 8554 - protein, 20 aa, Artificial Sequence
  Synthetic
AKNRGTYCSGGSCHSYPDEY

SEQ ID NO: 8555 - protein, 106 aa, Artificial Sequence; identical to SEQ ID NO: 6555
  Synthetic

SEQ ID NO: 8556 - protein, 8 aa, Artificial Sequence
  Synthetic
QQYDNVPL

SEQ ID NO: 8557 - protein, 122 aa, Artificial Sequence; identical to SEQ ID NO: 6557
  Synthetic

SEQ ID NO: 8558 - protein, 15 aa, Artificial Sequence
  Synthetic
ARRRGELSYYYGLDV

SEQ ID NO: 8559 - protein, 108 aa, Artificial Sequence; identical to SEQ ID NO: 6559
  Synthetic

SEQ ID NO: 8560 - protein, 10 aa, Artificial Sequence
  Synthetic
QQTYSTLRGT

SEQ ID NO: 8561 - protein, 125 aa, Artificial Sequence; identical to SEQ ID NO: 6561
  Synthetic

SEQ ID NO: 8562 - protein, 18 aa, Artificial Sequence
  Synthetic
ARDFSLTDMVTLTDAFDV

SEQ ID NO: 8563 - protein, 108 aa, Artificial Sequence; identical to SEQ ID NO: 6563
  Synthetic

SEQ ID NO: 8564 - protein, 10 aa, Artificial Sequence
  Synthetic
QQLNTYPLFT

SEQ ID NO: 8565 - protein, 117 aa, Artificial Sequence; identical to SEQ ID NO: 6565
  Synthetic

SEQ ID NO: 8566 - protein, 11 aa, Artificial Sequence
  Synthetic
ARGRPECLFDY

SEQ ID NO: 8567 - protein, 107 aa, Artificial Sequence; identical to SEQ ID NO: 6567
  Synthetic

SEQ ID NO: 8568 - protein, 9 aa, Artificial Sequence
  Synthetic
QHYDNLPST

SEQ ID NO: 8569 - protein, 117 aa, Artificial Sequence; identical to SEQ ID NO: 6569
  Synthetic

SEQ ID NO: 8570 - protein, 11 aa, Artificial Sequence
  Synthetic
ARDRGRPAFDI

SEQ ID NO: 8571 - protein, 107 aa, Artificial Sequence; identical to SEQ ID NO: 6571
  Synthetic

SEQ ID NO: 8572 - protein, 9 aa, Artificial Sequence
  Synthetic
QQYDNLPRT

SEQ ID NO: 8573 - protein, 127 aa, Artificial Sequence; identical to SEQ ID NO: 6573
  Synthetic

SEQ ID NO: 8574 - protein, 20 aa, Artificial Sequence
  Synthetic
AKNVGLYCAGGSCYSGQLDY

SEQ ID NO: 8575 - protein, 108 aa, Artificial Sequence; identical to SEQ ID NO: 6575
  Synthetic

SEQ ID NO: 8576 - protein, 10 aa, Artificial Sequence
  Synthetic
QQYDNLPPIT

SEQ ID NO: 8577 - protein, 121 aa, Artificial Sequence; identical to SEQ ID NO: 305
  Synthetic

SEQ ID NO: 8578 - protein, 14 aa, Artificial Sequence
  Synthetic
ARVPPPQRLHPFDV

SEQ ID NO: 8579 - protein, 106 aa, Artificial Sequence; identical to SEQ ID NO: 306
  Synthetic

SEQ ID NO: 8580 - protein, 9 aa, Artificial Sequence
  Synthetic
QQYFRYSWT

SEQ ID NO: 8581 - protein, 124 aa, Artificial Sequence; identical to SEQ ID NO: 6581
  Synthetic

SEQ ID NO: 8582 - protein, 17 aa, Artificial Sequence
  Synthetic
ARLQSYDSYFYYYYMDV

SEQ ID NO: 8583 - protein, 107 aa, Artificial Sequence; identical to SEQ ID NO: 6583
  Synthetic

SEQ ID NO: 8584 - protein, 9 aa, Artificial Sequence
  Synthetic
QQYKSYSHT

SEQ ID NO: 8585 - protein, 122 aa, Artificial Sequence; identical to SEQ ID NO: 6585
  Synthetic
  misc_feature (33)..(33): Xaa can be any naturally occurring amino acid

SEQ ID NO: 8586 - protein, 17 aa, Artificial Sequence
  Synthetic
ARGVAVTGGLYYYYMDV

SEQ ID NO: 8587 - protein, 108 aa, Artificial Sequence; identical to SEQ ID NO: 6587
  Synthetic

SEQ ID NO: 8588 - protein, 10 aa, Artificial Sequence
  Synthetic
QQSYESPPWT

SEQ ID NO: 8589 - protein, 124 aa, Artificial Sequence; identical to SEQ ID NO: 6589
  Synthetic

SEQ ID NO: 8590 - protein, 17 aa, Artificial Sequence
  Synthetic
AKNLALYGSGSYYYFDY

SEQ ID NO: 8591 - protein, 107 aa, Artificial Sequence; identical to SEQ ID NO: 6591
  Synthetic

SEQ ID NO: 8592 - protein, 9 aa, Artificial Sequence
  Synthetic
QQYESLPLT

SEQ ID NO: 8593 - protein, 122 aa, Artificial Sequence; identical to SEQ ID NO: 6593
  Synthetic

SEQ ID NO: 8594 - protein, 15 aa, Artificial Sequence
  Synthetic
ARVGVAGQYYYGMDV

SEQ ID NO: 8595 - protein, 108 aa, Artificial Sequence; identical to SEQ ID NO: 6595
  Synthetic

SEQ ID NO: 8596 - protein, 9 aa, Artificial Sequence
  Synthetic
QQYGSSPWT

SEQ ID NO: 8597 - protein, 121 aa, Artificial Sequence; identical to SEQ ID NO: 357
  Synthetic

SEQ ID NO: 8598 - protein, 15 aa, Artificial Sequence
  Synthetic
ARDYVLVPARSGMDV

SEQ ID NO: 8599 - protein, 107 aa, Artificial Sequence; identical to SEQ ID NO: 358
  Synthetic

SEQ ID NO: 8600 - protein, 9 aa, Artificial Sequence
  Synthetic
QQRSNWPYT

SEQ ID NO: 8601 - protein, 122 aa, Artificial Sequence; identical to SEQ ID NO: 351
  Synthetic

SEQ ID NO: 8602 - protein, 15 aa, Artificial Sequence
  Synthetic
ARDGTTMTPTDLLTD

SEQ ID NO: 8603 - protein, 108 aa, Artificial Sequence; identical to SEQ ID NO: 6603
  Synthetic

SEQ ID NO: 8604 - protein, 10 aa, Artificial Sequence
  Synthetic
QQSYSTPPLT

SEQ ID NO: 8605 - protein, 118 aa, Artificial Sequence; identical to SEQ ID NO: 6605
  Synthetic

SEQ ID NO: 8606 - protein, 13 aa, Artificial Sequence
  Synthetic
ARYLPYGDSAFDY

SEQ ID NO: 8607 - protein, 107 aa, Artificial Sequence; identical to SEQ ID NO: 6607
  Synthetic

SEQ ID NO: 8608 - protein, 9 aa, Artificial Sequence
  Synthetic
QKYNSVPFT

SEQ ID NO: 8609 - protein, 117 aa, Artificial Sequence; identical to SEQ ID NO: 327
  Synthetic

SEQ ID NO: 8610 - protein, 11 aa, Artificial Sequence
  Synthetic
ARDLVVWGMDV

SEQ ID NO: 8611 - protein, 107 aa, Artificial Sequence; identical to SEQ ID NO: 328
  Synthetic

SEQ ID NO: 8612 - protein, 9 aa, Artificial Sequence
  Synthetic
QQLNTYPYT

SEQ ID NO: 8613 - protein, 127 aa, Artificial Sequence; identical to SEQ ID NO: 6613
  Synthetic

SEQ ID NO: 8614 - protein, 20 aa, Artificial Sequence
  Synthetic
AKAGGSYCSGGNCYTNYLDY

SEQ ID NO: 8615 - protein, 107 aa, Artificial Sequence; identical to SEQ ID NO: 6615
  Synthetic

SEQ ID NO: 8616 - protein, 9 aa, Artificial Sequence
  Synthetic
QQYDNLPLT

SEQ ID NO: 8617 - protein, 124 aa, Artificial Sequence; identical to SEQ ID NO: 6617
  Synthetic

SEQ ID NO: 8618 - protein, 17 aa, Artificial Sequence
  Synthetic
ARDRGSGSGSPLGWFDP

SEQ ID NO: 8619 - protein, 107 aa, Artificial Sequence; identical to SEQ ID NO: 6619
  Synthetic

SEQ ID NO: 8620 - protein, 9 aa, Artificial Sequence
  Synthetic
QQYDNLPLT

SEQ ID NO: 8621 - protein, 118 aa, Artificial Sequence; identical to SEQ ID NO: 6621
  Synthetic

SEQ ID NO: 8622 - protein, 11 aa, Artificial Sequence
  Synthetic
AREGTSGWYVY

SEQ ID NO: 8623 - protein, 108 aa, Artificial Sequence; identical to SEQ ID NO: 6623
  Synthetic

SEQ ID NO: 8624 - protein, 9 aa, Artificial Sequence
  Synthetic
QQYGGSLVT

SEQ ID NO: 8625 - protein, 120 aa, Artificial Sequence; identical to SEQ ID NO: 6625
  Synthetic

SEQ ID NO: 8626 - protein, 13 aa, Artificial Sequence
  Synthetic
ARDGYGDYRAYDY

SEQ ID NO: 8627 - protein, 107 aa, Artificial Sequence; identical to SEQ ID NO: 6627
  Synthetic

SEQ ID NO: 8628 - protein, 9 aa, Artificial Sequence
  Synthetic
QQSFITPRT

SEQ ID NO: 8629 - protein, 124 aa, Artificial Sequence; identical to SEQ ID NO: 6629
  Synthetic

SEQ ID NO: 8630 - protein, 17 aa, Artificial Sequence
  Synthetic
ARVEYYYDSSGTYYFDH

SEQ ID NO: 8631 - protein, 109 aa, Artificial Sequence; identical to SEQ ID NO: 6631
  Synthetic

SEQ ID NO: 8632 - protein, 11 aa, Artificial Sequence
  Synthetic
QQYDDWPPKWT

SEQ ID NO: 8633 - protein, 122 aa, Artificial Sequence; identical to SEQ ID NO: 6633
  Synthetic

SEQ ID NO: 8634 - protein, 16 aa, Artificial Sequence
  Synthetic
AVRGFRELYYPHGMEV

SEQ ID NO: 8635 - protein, 106 aa, Artificial Sequence; identical to SEQ ID NO: 6635
  Synthetic

SEQ ID NO: 8636 - protein, 9 aa, Artificial Sequence
  Synthetic
QHYENLPPG

SEQ ID NO: 8637 - protein, 122 aa, Artificial Sequence; identical to SEQ ID NO: 289
  Synthetic

SEQ ID NO: 8638 - protein, 15 aa, Artificial Sequence
  Synthetic
ARDLENVLIEVALQD

SEQ ID NO: 8639 - protein, 108 aa, Artificial Sequence; identical to SEQ ID NO: 290
  Synthetic

SEQ ID NO: 8640 - protein, 10 aa, Artificial Sequence
  Synthetic
QQSYTTLALT

SEQ ID NO: 8641 - protein, 119 aa, Artificial Sequence; identical to SEQ ID NO: 6641
  Synthetic

SEQ ID NO: 8642 - protein, 13 aa, Artificial Sequence
  Synthetic
ARPVVGGRAGMDV

SEQ ID NO: 8643 - protein, 107 aa, Artificial Sequence; identical to SEQ ID NO: 6643
  Synthetic

SEQ ID NO: 8644 - protein, 9 aa, Artificial Sequence
  Synthetic
LHNDNPPLT

SEQ ID NO: 8645 - protein, 125 aa, Artificial Sequence; identical to SEQ ID NO: 6645
  Synthetic

SEQ ID NO: 8646 - protein, 17 aa, Artificial Sequence
  Synthetic
ARDAIGSASYGVEYFQH

SEQ ID NO: 8647 - protein, 109 aa, Artificial Sequence; identical to SEQ ID NO: 6647
  Synthetic

SEQ ID NO: 8648 - protein, 10 aa, Artificial Sequence
  Synthetic
QQYGSSPPYT

SEQ ID NO: 8649 - protein, 123 aa, Artificial Sequence; identical to SEQ ID NO: 6649
  Synthetic

SEQ ID NO: 8650 - protein, 16 aa, Artificial Sequence
  Synthetic
AKDIGGSYYLMYYFDY

SEQ ID NO: 8651 - protein, 108 aa, Artificial Sequence; identical to SEQ ID NO: 6651
  Synthetic

SEQ ID NO: 8652 - protein, 10 aa, Artificial Sequence
  Synthetic
QQYDILPPIT

SEQ ID NO: 8653 - protein, 120 aa, Artificial Sequence; identical to SEQ ID NO: 6653
  Synthetic
  misc_feature (60)..(60): Xaa can be any naturally occurring amino acid
  misc_feature (65)..(65): Xaa can be any naturally occurring amino acid
  misc_feature (69)..(71): Xaa can be any naturally occurring amino acid

SEQ ID NO: 8654 - protein, 13 aa, Artificial Sequence
  Synthetic
AREQQLPINWFDT

SEQ ID NO: 8655 - protein, 107 aa, Artificial Sequence; identical to SEQ ID NO: 6655
  Synthetic

SEQ ID NO: 8656 - protein, 9 aa, Artificial Sequence
  Synthetic
QQRSNWPST

SEQ ID NO: 8657 - protein, 127 aa, Artificial Sequence; identical to SEQ ID NO: 6657
  Synthetic

SEQ ID NO: 8658 - protein, 22 aa, Artificial Sequence
  Synthetic
ARGDHKSGWSEHRSFYFYYMDV

SEQ ID NO: 8659 - protein, 108 aa, Artificial Sequence; identical to SEQ ID NO: 6659
  Synthetic

SEQ ID NO: 8660 - protein, 10 aa, Artificial Sequence
  Synthetic
QQSYITTAYT

SEQ ID NO: 8661 - protein, 123 aa, Artificial Sequence; identical to SEQ ID NO: 6661
  Synthetic

SEQ ID NO: 8662 - protein, 16 aa, Artificial Sequence
  Synthetic
AKDLGYYYGPPYGPDY

SEQ ID NO: 8663 - protein, 108 aa, Artificial Sequence; identical to SEQ ID NO: 6663
  Synthetic

SEQ ID NO: 8664 - protein, 10 aa, Artificial Sequence
  Synthetic
LQYDNFSMYT

SEQ ID NO: 8665 - protein, 127 aa, Artificial Sequence; identical to SEQ ID NO: 6665
  Synthetic

SEQ ID NO: 8666 - protein, 20 aa, Artificial Sequence
  Synthetic
AKQTAPYCSGGNCYSGYFDY

SEQ ID NO: 8667 - protein, 105 aa, Artificial Sequence; identical to SEQ ID NO: 6667
  Synthetic

SEQ ID NO: 8668 - skipped

SEQ ID NO: 8669 - protein, 116 aa, Artificial Sequence; identical to SEQ ID NO: 6669
  Synthetic

SEQ ID NO: 8670 - protein, 10 aa, Artificial Sequence
  Synthetic
ARAVWDAFDI

SEQ ID NO: 8671 - protein, 109 aa, Artificial Sequence; identical to SEQ ID NO: 6671
  Synthetic

SEQ ID NO: 8672 - protein, 11 aa, Artificial Sequence
  Synthetic
QHLNSYPSPNT

SEQ ID NO: 8673 - protein, 123 aa, Artificial Sequence; identical to SEQ ID NO: 6673
  Synthetic

SEQ ID NO: 8674 - protein, 16 aa, Artificial Sequence
  Synthetic
AKSISPYTSGWYYFDY

SEQ ID NO: 8675 - protein, 107 aa, Artificial Sequence; identical to SEQ ID NO: 6675
  Synthetic

SEQ ID NO: 8676 - protein, 9 aa, Artificial Sequence
  Synthetic
LQYNNLPLT

SEQ ID NO: 8677 - protein, 122 aa, Artificial Sequence; identical to SEQ ID NO: 6677
  Synthetic

SEQ ID NO: 8678 - protein, 15 aa, Artificial Sequence
  Synthetic
ARDGPPTSLVTCPDF

SEQ ID NO: 8679 - protein, 107 aa, Artificial Sequence; identical to SEQ ID NO: 6679
  Synthetic

SEQ ID NO: 8680 - protein, 10 aa, Artificial Sequence
  Synthetic
QQSYSTPPWT

SEQ ID NO: 8681 - protein, 124 aa, Artificial Sequence; identical to SEQ ID NO: 6681
  Synthetic

SEQ ID NO: 8682 - protein, 18 aa, Artificial Sequence
  Synthetic
ARGDMATRRPFYYYYMDV

SEQ ID NO: 8683 - protein, 108 aa, Artificial Sequence; identical to SEQ ID NO: 6683
  Synthetic

SEQ ID NO: 8684 - protein, 10 aa, Artificial Sequence
  Synthetic
QQSYSNPNLT

SEQ ID NO: 8685 - protein, 118 aa, Artificial Sequence; identical to SEQ ID NO: 6685
  Synthetic

SEQ ID NO: 8686 - protein, 12 aa, Artificial Sequence
  Synthetic
ARDFSVVGAFDI

SEQ ID NO: 8687 - protein, 109 aa, Artificial Sequence; identical to SEQ ID NO: 6687
  Synthetic

SEQ ID NO: 8688 - protein, 10 aa, Artificial Sequence
  Synthetic
QQYGTSPRVT

SEQ ID NO: 8689 - protein, 127 aa, Artificial Sequence; identical to SEQ ID NO: 6689
  Synthetic

SEQ ID NO: 8690 - protein, 20 aa, Artificial Sequence
  Synthetic
AKVSGPYCSGHSCYSATFDY

SEQ ID NO: 8691 - protein, 107 aa, Artificial Sequence; identical to SEQ ID NO: 6691
  Synthetic

SEQ ID NO: 8692 - protein, 9 aa, Artificial Sequence
  Synthetic
QQYDHLPPT

SEQ ID NO: 8693 - protein, 122 aa, Artificial Sequence; identical to SEQ ID NO: 6693
  Synthetic

SEQ ID NO: 8694 - protein, 15 aa, Artificial Sequence
  Synthetic
ATFHVAYGDYIPFDS

SEQ ID NO: 8695 - protein, 109 aa, Artificial Sequence; identical to SEQ ID NO: 6695
  Synthetic

SEQ ID NO: 8696 - protein, 10 aa, Artificial Sequence
  Synthetic
QQYGRSPTWT

SEQ ID NO: 8697 - protein, 129 aa, Artificial Sequence; identical to SEQ ID NO: 6697
  Synthetic

SEQ ID NO: 8698 - protein, 22 aa, Artificial Sequence
  Synthetic
ARVPRGYYDRSGHYHGQDYFDY

SEQ ID NO: 8699 - protein, 108 aa, Artificial Sequence; identical to SEQ ID NO: 6699
  Synthetic

SEQ ID NO: 8700 - protein, 9 aa, Artificial Sequence
  Synthetic
QQYGSSPIT

SEQ ID NO: 8701 - protein, 115 aa, Artificial Sequence; identical to SEQ ID NO: 6701
  Synthetic

SEQ ID NO: 8702 - protein, 9 aa, Artificial Sequence
  Synthetic
ARHPYGTDV

SEQ ID NO: 8703 - protein, 107 aa, Artificial Sequence; identical to SEQ ID NO: 6703
  Synthetic
  misc_feature (33)..(33): Xaa can be any naturally occurring amino acid

SEQ ID NO: 8704 - protein, 9 aa, Artificial Sequence
  Synthetic
QQYDNLPIT

SEQ ID NO: 8705 - protein, 123 aa, Artificial Sequence; identical to SEQ ID NO: 6705
  Synthetic

SEQ ID NO: 8706 - protein, 16 aa, Artificial Sequence
  Synthetic
VSRRWDPLRFYYYMDV

SEQ ID NO: 8707 - protein, 111 aa, Artificial Sequence; identical to SEQ ID NO: 6707
  Synthetic

SEQ ID NO: 8708 - protein, 9 aa, Artificial Sequence
  Synthetic
MQALQTPPT

SEQ ID NO: 8709 - protein, 120 aa, Artificial Sequence; identical to SEQ ID NO: 6709
  Synthetic

SEQ ID NO: 8710 - protein, 13 aa, Artificial Sequence
  Synthetic
ARDNEITAIDIDY

SEQ ID NO: 8711 - protein, 112 aa, Artificial Sequence; identical to SEQ ID NO: 6711
  Synthetic

SEQ ID NO: 8712 - protein, 9 aa, Artificial Sequence
  Synthetic
MQGTHWPGT

SEQ ID NO: 8713 - protein, 123 aa, Artificial Sequence; identical to SEQ ID NO: 6713
  Synthetic

SEQ ID NO: 8714 - protein, 16 aa, Artificial Sequence
  Synthetic
ASRRWDPLTFYYYMVV

SEQ ID NO: 8715 - protein, 112 aa, Artificial Sequence; identical to SEQ ID NO: 6715
  Synthetic

SEQ ID NO: 8716 - protein, 9 aa, Artificial Sequence
  Synthetic
MQALQTPPT

SEQ ID NO: 8717 - protein, 132 aa, Artificial Sequence; identical to SEQ ID NO: 6717
  Synthetic

SEQ ID NO: 8718 - protein, 25 aa, Artificial Sequence
  Synthetic
ARVLGRGSVAGNIKSTLFGLDAFDI

SEQ ID NO: 8719 - protein, 109 aa, Artificial Sequence; identical to SEQ ID NO: 6719
  Synthetic

SEQ ID NO: 8720 - protein, 11 aa, Artificial Sequence
  Synthetic
QQYNNWPPAFT

SEQ ID NO: 8721 - protein, 123 aa, Artificial Sequence; identical to SEQ ID NO: 6721
  Synthetic

SEQ ID NO: 8722 - protein, 16 aa, Artificial Sequence
  Synthetic
AAPSCTSTICYDAFNI

SEQ ID NO: 8723 - protein, 108 aa, Artificial Sequence; identical to SEQ ID NO: 6723
  Synthetic

SEQ ID NO: 8724 - protein, 9 aa, Artificial Sequence
  Synthetic
QHYGGSLFT

SEQ ID NO: 8725 - protein, 129 aa, Artificial Sequence; identical to SEQ ID NO: 343
  Synthetic

SEQ ID NO: 8726 - protein, 22 aa, Artificial Sequence
  Synthetic
ASGLLWFETREISGAPDYGMAV

SEQ ID NO: 8727 - protein, 107 aa, Artificial Sequence; identical to SEQ ID NO: 344
  Synthetic

SEQ ID NO: 8728 - protein, 9 aa, Artificial Sequence
  Synthetic
QQSYSTPLT

SEQ ID NO: 8729 - protein, 117 aa, Artificial Sequence; identical to SEQ ID NO: 6729
  Synthetic

SEQ ID NO: 8730 - protein, 11 aa, Artificial Sequence
  Synthetic
ARESYHSAFDI

SEQ ID NO: 8731 - protein, 109 aa, Artificial Sequence; identical to SEQ ID NO: 6731
  Synthetic

SEQ ID NO: 8732 - protein, 11 aa, Artificial Sequence
  Synthetic
QQLNSYPPRDT

SEQ ID NO: 8733 - protein, 129 aa, Artificial Sequence; identical to SEQ ID NO: 6733
  Synthetic

SEQ ID NO: 8734 - protein, 22 aa, Artificial Sequence
  Synthetic
ARPPRYYYDRSGYYVWEDYFDY

SEQ ID NO: 8735 - protein, 108 aa, Artificial Sequence; identical to SEQ ID NO: 6735
  Synthetic

SEQ ID NO: 8736 - protein, 9 aa, Artificial Sequence
  Synthetic
QQYGSSPYT

SEQ ID NO: 8737 - protein, 123 aa, Artificial Sequence; identical to SEQ ID NO: 6737
  Synthetic

SEQ ID NO: 8738 - protein, 17 aa, Artificial Sequence
  Synthetic
VRAGYSSGWPLYWYFDL

SEQ ID NO: 8739 - protein, 109 aa, Artificial Sequence; identical to SEQ ID NO: 6739
  Synthetic

SEQ ID NO: 8740 - protein, 11 aa, Artificial Sequence
  Synthetic
QQSYRTPPEFT

SEQ ID NO: 8741 - protein, 123 aa, Artificial Sequence; identical to SEQ ID NO: 6741
  Synthetic

SEQ ID NO: 8742 - protein, 16 aa, Artificial Sequence
  Synthetic
GRDEAFLPSAIFVGDY

SEQ ID NO: 8743 - protein, 109 aa, Artificial Sequence; identical to SEQ ID NO: 6743
  Synthetic

SEQ ID NO: 8744 - protein, 11 aa, Artificial Sequence
  Synthetic
LQHNSYPHTWT

SEQ ID NO: 8745 - protein, 119 aa, Artificial Sequence; identical to SEQ ID NO: 311
  Synthetic

SEQ ID NO: 8746 - protein, 12 aa, Artificial Sequence
  Synthetic
ARDGGGYDRFDH

SEQ ID NO: 8747 - protein, 107 aa, Artificial Sequence; identical to SEQ ID NO: 6747
  Synthetic

SEQ ID NO: 8748 - protein, 9 aa, Artificial Sequence
  Synthetic
LQYDNLPLT

SEQ ID NO: 8749 - protein, 128 aa, Artificial Sequence; identical to SEQ ID NO: 6749
  Synthetic

SEQ ID NO: 8750 - protein, 22 aa, Artificial Sequence
  Synthetic
VRGTTVVRGLIEKYYHYYVMDV

SEQ ID NO: 8751 - protein, 108 aa, Artificial Sequence; identical to SEQ ID NO: 6751
  Synthetic

SEQ ID NO: 8752 - protein, 10 aa, Artificial Sequence
  Synthetic
QQSYSNPGWT

SEQ ID NO: 8753 - protein, 117 aa, Artificial Sequence; identical to SEQ ID NO: 6753
  Synthetic

SEQ ID NO: 8754 - protein, 11 aa, Artificial Sequence
  Synthetic
ARDLVVYGMDV

SEQ ID NO: 8755 - protein, 107 aa, Artificial Sequence; identical to SEQ ID NO: 6755
  Synthetic

SEQ ID NO: 8756 - protein, 9 aa, Artificial Sequence
  Synthetic
QQLNSDPIT

SEQ ID NO: 8757 - protein, 124 aa, Artificial Sequence; identical to SEQ ID NO: 6757
  Synthetic

SEQ ID NO: 8758 - protein, 18 aa, Artificial Sequence
  Synthetic
ARDFYRPTTFRGEAKGDY

SEQ ID NO: 8759 - protein, 107 aa, Artificial Sequence; identical to SEQ ID NO: 6759
  Synthetic

SEQ ID NO: 8760 - protein, 9 aa, Artificial Sequence
  Synthetic
HQYDNLPRT

SEQ ID NO: 8761 - protein, 120 aa, Artificial Sequence; identical to SEQ ID NO: 6761
  Synthetic

SEQ ID NO: 8762 - protein, 14 aa, Artificial Sequence
  Synthetic
ARDSEWLQFASFDY

SEQ ID NO: 8763 - protein, 107 aa, Artificial Sequence; identical to SEQ ID NO: 6763
  Synthetic

SEQ ID NO: 8764 - protein, 8 aa, Artificial Sequence
  Synthetic
QQYGSSHT

SEQ ID NO: 8765 - protein, 123 aa, Artificial Sequence; identical to SEQ ID NO: 6765
  Synthetic

SEQ ID NO: 8766 - protein, 16 aa, Artificial Sequence
  Synthetic
AKDLGYYYGPPYGPDY

SEQ ID NO: 8767 - protein, 108 aa, Artificial Sequence; identical to SEQ ID NO: 6767
  Synthetic

SEQ ID NO: 8768 - protein, 10 aa, Artificial Sequence
  Synthetic
LQYDNFSMYT

SEQ ID NO: 8769 - protein, 121 aa, Artificial Sequence; identical to SEQ ID NO: 6769
  Synthetic

SEQ ID NO: 8770 - protein, 14 aa, Artificial Sequence
  Synthetic
AKGGPYGDHVRSDY

SEQ ID NO: 8771 - protein, 107 aa, Artificial Sequence; identical to SEQ ID NO: 6771
  Synthetic

SEQ ID NO: 8772 - protein, 9 aa, Artificial Sequence
  Synthetic
QQFHNLPLT

SEQ ID NO: 8773 - protein, 122 aa, Artificial Sequence; identical to SEQ ID NO: 307
  Synthetic

SEQ ID NO: 8774 - protein, 14 aa, Artificial Sequence
  Synthetic
ARHFADGSGRVVDS

SEQ ID NO: 8775 - protein, 108 aa, Artificial Sequence; identical to SEQ ID NO: 308
  Synthetic

SEQ ID NO: 8776 - protein, 10 aa, Artificial Sequence
  Synthetic
QQRINWPLYT

SEQ ID NO: 8777 - protein, 126 aa, Artificial Sequence; identical to SEQ ID NO: 6777
  Synthetic

SEQ ID NO: 8778 - protein, 19 aa, Artificial Sequence
  Synthetic
ARGRWRAAALSTLRTAFDY

SEQ ID NO: 8779 - protein, 108 aa, Artificial Sequence; identical to SEQ ID NO: 6779
  Synthetic

SEQ ID NO: 8780 - protein, 10 aa, Artificial Sequence
  Synthetic
QQYNKWPMYT

SEQ ID NO: 8781 - protein, 122 aa, Artificial Sequence; identical to SEQ ID NO: 6781
  Synthetic

SEQ ID NO: 8782 - protein, 15 aa, Artificial Sequence
  Synthetic
VKDELGGYFGNYFDY

SEQ ID NO: 8783 - protein, 110 aa, Artificial Sequence; identical to SEQ ID NO: 6783
  Synthetic

SEQ ID NO: 8784 - protein, 12 aa, Artificial Sequence
  Synthetic
QQSYSAPPGPYT

SEQ ID NO: 8785 - protein, 120 aa, Artificial Sequence; identical to SEQ ID NO: 6785
  Synthetic

SEQ ID NO: 8786 - protein, 11 aa, Artificial Sequence
  Synthetic
TRWDGWSQHDY

SEQ ID NO: 8787 - protein, 111 aa, Artificial Sequence; identical to SEQ ID NO: 6787
  Synthetic

SEQ ID NO: 8788 - protein, 9 aa, Artificial Sequence
  Synthetic
MQVLQIPYT

SEQ ID NO: 8789 - protein, 126 aa, Artificial Sequence; identical to SEQ ID NO: 6789
  Synthetic

SEQ ID NO: 8790 - protein, 19 aa, Artificial Sequence
  Synthetic
ARGGCSSNSCYAAQYGMDV

SEQ ID NO: 8791 - protein, 107 aa, Artificial Sequence; identical to SEQ ID NO: 6791
  Synthetic

SEQ ID NO: 8792 - protein, 9 aa, Artificial Sequence
  Synthetic
QQYDNPALT

SEQ ID NO: 8793 - protein, 120 aa, Artificial Sequence; identical to SEQ ID NO: 6793
  Synthetic

SEQ ID NO: 8794 - protein, 13 aa, Artificial Sequence
  Synthetic
ATGGLFMIRGLEI

SEQ ID NO: 8795 - protein, 109 aa, Artificial Sequence; identical to SEQ ID NO: 6795
  Synthetic

SEQ ID NO: 8796 - protein, 10 aa, Artificial Sequence
  Synthetic
QQYGNSPRLS

SEQ ID NO: 8797 - protein, 118 aa, Artificial Sequence; identical to SEQ ID NO: 6797
  Synthetic

SEQ ID NO: 8798 - protein, 12 aa, Artificial Sequence
  Synthetic
ARDLSVVGAFDI

SEQ ID NO: 8799 - protein, 109 aa, Artificial Sequence; identical to SEQ ID NO: 6799
  Synthetic

SEQ ID NO: 8800 - protein, 10 aa, Artificial Sequence
  Synthetic
QQYGTSPRVT

SEQ ID NO: 8801 - protein, 118 aa, Artificial Sequence; identical to SEQ ID NO: 6801
  Synthetic

SEQ ID NO: 8802 - protein, 12 aa, Artificial Sequence
  Synthetic
ARLPPHRGDRDY

SEQ ID NO: 8803 - protein, 107 aa, Artificial Sequence; identical to SEQ ID NO: 6803
  Synthetic

SEQ ID NO: 8804 - protein, 9 aa, Artificial Sequence
  Synthetic
QKYDSTPLT

SEQ ID NO: 8805 - protein, 122 aa, Artificial Sequence; identical to SEQ ID NO: 6805
  Synthetic

SEQ ID NO: 8806 - protein, 16 aa, Artificial Sequence
  Synthetic
ATYYYDSTGYSYGMDV

SEQ ID NO: 8807 - protein, 107 aa, Artificial Sequence; identical to SEQ ID NO: 6807
  Synthetic

SEQ ID NO: 8808 - protein, 9 aa, Artificial Sequence
  Synthetic
QQTYSSPQT

SEQ ID NO: 8809 - protein, 125 aa, Artificial Sequence; identical to SEQ ID NO: 6809
  Synthetic

SEQ ID NO: 8810 - protein, 18 aa, Artificial Sequence
  Synthetic
AKDGLPLRGSGSPYGMDV

SEQ ID NO: 8811 - protein, 107 aa, Artificial Sequence; identical to SEQ ID NO: 6811
  Synthetic

SEQ ID NO: 8812 - protein, 9 aa, Artificial Sequence
  Synthetic
QQSYRTLLT

SEQ ID NO: 8813 - protein, 121 aa, Artificial Sequence; identical to SEQ ID NO: 6813
  Synthetic

SEQ ID NO: 8814 - protein, 15 aa, Artificial Sequence
  Synthetic
AIINNSGWRYDAFDI

SEQ ID NO: 8815 - protein, 107 aa, Artificial Sequence; identical to SEQ ID NO: 6815
  Synthetic

SEQ ID NO: 8816 - protein, 9 aa, Artificial Sequence
  Synthetic
QQSYFTPRA

SEQ ID NO: 8817 - protein, 127 aa, Artificial Sequence; identical to SEQ ID NO: 6817
  Synthetic

SEQ ID NO: 8818 - protein, 20 aa, Artificial Sequence
  Synthetic
ARTGRSYYSDNSGYYPYFDY

SEQ ID NO: 8819 - protein, 106 aa, Artificial Sequence; identical to SEQ ID NO: 6819
  Synthetic

SEQ ID NO: 8820 - protein, 8 aa, Artificial Sequence
  Synthetic
QQSYRTIT

SEQ ID NO: 8821 - protein, 129 aa, Artificial Sequence; identical to SEQ ID NO: 6821
  Synthetic

SEQ ID NO: 8822 - protein, 22 aa, Artificial Sequence
  Synthetic
AKDHSSLSGAFGDLIGSGPVDP

SEQ ID NO: 8823 - protein, 109 aa, Artificial Sequence; identical to SEQ ID NO: 6823
  Synthetic

SEQ ID NO: 8824 - protein, 11 aa, Artificial Sequence
  Synthetic
QQYNNRPRGYT

SEQ ID NO: 8825 - protein, 117 aa, Artificial Sequence; identical to SEQ ID NO: 6825
  Synthetic

SEQ ID NO: 8826 - protein, 11 aa, Artificial Sequence
  Synthetic
AREIYDDVLDT

SEQ ID NO: 8827 - protein, 106 aa, Artificial Sequence; identical to SEQ ID NO: 6827
  Synthetic

SEQ ID NO: 8828 - protein, 9 aa, Artificial Sequence
  Synthetic
QQLNSYLHT

SEQ ID NO: 8829 - protein, 120 aa, Artificial Sequence; identical to SEQ ID NO: 6829
  Synthetic

SEQ ID NO: 8830 - protein, 14 aa, Artificial Sequence
  Synthetic
ARDLGSGWVWVMDV

SEQ ID NO: 8831 - protein, 108 aa, Artificial Sequence; identical to SEQ ID NO: 6831
  Synthetic

SEQ ID NO: 8832 - protein, 10 aa, Artificial Sequence
  Synthetic
QQSYSNPPLT

SEQ ID NO: 8833 - protein, 124 aa, Artificial Sequence; identical to SEQ ID NO: 6833
  Synthetic

SEQ ID NO: 8834 - protein, 17 aa, Artificial Sequence
  Synthetic
AAAYYYDSSGILGGDDY

SEQ ID NO: 8835 - protein, 106 aa, Artificial Sequence; identical to SEQ ID NO: 6835
  Synthetic

SEQ ID NO: 8836 - protein, 8 aa, Artificial Sequence
  Synthetic
QHRYNWLT

SEQ ID NO: 8837 - protein, 118 aa, Artificial Sequence; identical to SEQ ID NO: 6837
  Synthetic

SEQ ID NO: 8838 - protein, 11 aa, Artificial Sequence
  Synthetic
ATTFQWDLLVY

SEQ ID NO: 8839 - protein, 108 aa, Artificial Sequence; identical to SEQ ID NO: 6839
  Synthetic

SEQ ID NO: 8840 - protein, 10 aa, Artificial Sequence
  Synthetic
QQYDHLPIFT

SEQ ID NO: 8841 - protein, 125 aa, Artificial Sequence; identical to SEQ ID NO: 6841
  Synthetic

SEQ ID NO: 8842 - protein, 16 aa, Artificial Sequence
  Synthetic
TKDIAAGIPALNWFDS

SEQ ID NO: 8843 - protein, 109 aa, Artificial Sequence; identical to SEQ ID NO: 6843
  Synthetic

SEQ ID NO: 8844 - protein, 11 aa, Artificial Sequence
  Synthetic
QQHTNWPPRIT

SEQ ID NO: 8845 - protein, 121 aa, Artificial Sequence; identical to SEQ ID NO: 6845
  Synthetic

SEQ ID NO: 8846 - protein, 14 aa, Artificial Sequence
  Synthetic
AKGGPYGDHVRSDY

SEQ ID NO: 8847 - protein, 104 aa, Artificial Sequence; identical to SEQ ID NO: 6847
  Synthetic
  misc_feature (87)..(87): Xaa can be any naturally occurring amino acid

SEQ ID NO: 8848 - protein, 9 aa, Artificial Sequence
  Synthetic
QQYEILPLT

SEQ ID NO: 8849 - protein, 124 aa, Artificial Sequence; identical to SEQ ID NO: 6849
  Synthetic

SEQ ID NO: 8850 - protein, 18 aa, Artificial Sequence
  Synthetic
ARVSYYYGSSGYSSYFDL

SEQ ID NO: 8851 - protein, 109 aa, Artificial Sequence; identical to SEQ ID NO: 6851
  Synthetic

SEQ ID NO: 8852 - protein, 11 aa, Artificial Sequence
  Synthetic
QQSYSNPPEDT

SEQ ID NO: 8853 - protein, 121 aa, Artificial Sequence; identical to SEQ ID NO: 303
  Synthetic

SEQ ID NO: 8854 - protein, 14 aa, Artificial Sequence
  Synthetic
ARVPPPQRLHPFDV

SEQ ID NO: 8855 - protein, 106 aa, Artificial Sequence; identical to SEQ ID NO: 304
  Synthetic

SEQ ID NO: 8856 - protein, 9 aa, Artificial Sequence
  Synthetic
QQYFRYSWT

SEQ ID NO: 8857 - protein, 121 aa, Artificial Sequence; identical to SEQ ID NO: 6769
  Synthetic

SEQ ID NO: 8858 - protein, 14 aa, Artificial Sequence
  Synthetic
AKGGPYGDHVRSDY

SEQ ID NO: 8859 - protein, 107 aa, Artificial Sequence; identical to SEQ ID NO: 6771
  Synthetic

SEQ ID NO: 8860 - protein, 9 aa, Artificial Sequence
  Synthetic
QQFHNLPLT

SEQ ID NO: 8861 - protein, 126 aa, Artificial Sequence; identical to SEQ ID NO: 6861
  Synthetic
  misc_feature (65)..(65): Xaa can be any naturally occurring amino acid
  misc_feature (76)..(76): Xaa can be any naturally occurring amino acid

SEQ ID NO: 8862 - protein, 18 aa, Artificial Sequence
  Synthetic
ARDSYSSSGYPSGGWFDP

SEQ ID NO: 8863 - protein, 108 aa, Artificial Sequence; identical to SEQ ID NO: 6863
  Synthetic

SEQ ID NO: 8864 - protein, 10 aa, Artificial Sequence
  Synthetic
QQSYSSPPWT

SEQ ID NO: 8865 - protein, 128 aa, Artificial Sequence; identical to SEQ ID NO: 6865
  Synthetic

SEQ ID NO: 8866 - protein, 16 aa, Artificial Sequence
  Synthetic
TQPPGYCSGGRCYFAS

SEQ ID NO: 8867 - protein, 106 aa, Artificial Sequence; identical to SEQ ID NO: 6867
  Synthetic

SEQ ID NO: 8868 - protein, 8 aa, Artificial Sequence
  Synthetic
QQYDNWHS

SEQ ID NO: 8869 - protein, 118 aa, Artificial Sequence; identical to SEQ ID NO: 6869
  Synthetic

SEQ ID NO: 8870 - protein, 12 aa, Artificial Sequence
  Synthetic
ARDLEVAGGFDC

SEQ ID NO: 8871 - protein, 108 aa, Artificial Sequence; identical to SEQ ID NO: 6871
  Synthetic

SEQ ID NO: 8872 - protein, 10 aa, Artificial Sequence
  Synthetic
QQLNDYPSIT

SEQ ID NO: 8873 - protein, 120 aa, Artificial Sequence; identical to SEQ ID NO: 6873
  Synthetic

SEQ ID NO: 8874 - protein, 13 aa, Artificial Sequence
  Synthetic
ARSRSGIHDAFDM

SEQ ID NO: 8875 - protein, 106 aa, Artificial Sequence; identical to SEQ ID NO: 6875
  Synthetic

SEQ ID NO: 8876 - protein, 8 aa, Artificial Sequence
  Synthetic
QQYDNLPL

SEQ ID NO: 8877 - protein, 119 aa, Artificial Sequence; identical to SEQ ID NO: 6877
  Synthetic

SEQ ID NO: 8878 - protein, 13 aa, Artificial Sequence
  Synthetic
ARDIGSIWPQFDP

SEQ ID NO: 8879 - protein, 108 aa, Artificial Sequence; identical to SEQ ID NO: 6879
  Synthetic

SEQ ID NO: 8880 - protein, 10 aa, Artificial Sequence
  Synthetic
QQSYTTVALT

SEQ ID NO: 8881 - protein, 122 aa, Artificial Sequence; identical to SEQ ID NO: 6881
  Synthetic

SEQ ID NO: 8882 - protein, 15 aa, Artificial Sequence
  Synthetic
VMRYYDILTGPWTPH

SEQ ID NO: 8883 - protein, 108 aa, Artificial Sequence; identical to SEQ ID NO: 6883
  Synthetic

SEQ ID NO: 8884 - protein, 10 aa, Artificial Sequence
  Synthetic
QQYDNLPPLT

SEQ ID NO: 8885 - protein, 122 aa, Artificial Sequence; identical to SEQ ID NO: 6885
  Synthetic

SEQ ID NO: 8886 - protein, 16 aa, Artificial Sequence
  Synthetic
ARDLGRSSGWPDAFDI

SEQ ID NO: 8887 - protein, 107 aa, Artificial Sequence; identical to SEQ ID NO: 6887
  Synthetic

SEQ ID NO: 8888 - protein, 9 aa, Artificial Sequence
  Synthetic
QQRSNWPGT

SEQ ID NO: 8889 - protein, 124 aa, Artificial Sequence; identical to SEQ ID NO: 6889
  Synthetic

SEQ ID NO: 8890 - protein, 17 aa, Artificial Sequence
  Synthetic
ARDTGFWSGNFPGLFDY

SEQ ID NO: 8891 - protein, 108 aa, Artificial Sequence; identical to SEQ ID NO: 6891
  Synthetic

SEQ ID NO: 8892 - protein, 10 aa, Artificial Sequence
  Synthetic
QHYDTLPPVT

SEQ ID NO: 8893 - protein, 123 aa, Artificial Sequence; identical to SEQ ID NO: 6893
  Synthetic

SEQ ID NO: 8894 - protein, 16 aa, Artificial Sequence
  Synthetic
ARDEAFLPSAIFVGDY

SEQ ID NO: 8895 - protein, 109 aa, Artificial Sequence; identical to SEQ ID NO: 6895
  Synthetic

SEQ ID NO: 8896 - protein, 11 aa, Artificial Sequence
  Synthetic
LQHSTYPHTWT

SEQ ID NO: 8897 - protein, 122 aa, Artificial Sequence; identical to SEQ ID NO: 6897
  Synthetic

SEQ ID NO: 8898 - protein, 16 aa, Artificial Sequence
  Synthetic
ATYYFDNSGYSYGLDV

SEQ ID NO: 8899 - protein, 107 aa, Artificial Sequence; identical to SEQ ID NO: 6899
  Synthetic

SEQ ID NO: 8900 - protein, 9 aa, Artificial Sequence
  Synthetic
QQSYSLPQT

SEQ ID NO: 8901 - protein, 123 aa, Artificial Sequence; identical to SEQ ID NO: 6901
  Synthetic

SEQ ID NO: 8902 - protein, 16 aa, Artificial Sequence
  Synthetic
ARDQDLDTAMVTLFDY

SEQ ID NO: 8903 - protein, 108 aa, Artificial Sequence; identical to SEQ ID NO: 6903
  Synthetic

SEQ ID NO: 8904 - protein, 10 aa, Artificial Sequence
  Synthetic
QQSYSTPPWT

SEQ ID NO: 8905 - protein, 123 aa, Artificial Sequence; identical to SEQ ID NO: 6905
  Synthetic

SEQ ID NO: 8906 - protein, 17 aa, Artificial Sequence
  Synthetic
ARKPLLYSDFSPGAFDI

SEQ ID NO: 8907 - protein, 107 aa, Artificial Sequence; identical to SEQ ID NO: 6907
  Synthetic

SEQ ID NO: 8908 - protein, 9 aa, Artificial Sequence
  Synthetic
QQYHTTPRT

SEQ ID NO: 8909 - protein, 119 aa, Artificial Sequence; identical to SEQ ID NO: 6909
  Synthetic

SEQ ID NO: 8910 - protein, 13 aa, Artificial Sequence
  Synthetic
ARESGDTTMAFDY

SEQ ID NO: 8911 - protein, 107 aa, Artificial Sequence; identical to SEQ ID NO: 6911
  Synthetic

SEQ ID NO: 8912 - protein, 9 aa, Artificial Sequence
  Synthetic
QQLNSDSYT

SEQ ID NO: 8913 - protein, 126 aa, Artificial Sequence; identical to SEQ ID NO: 6913
  Synthetic

SEQ ID NO: 8914 - protein, 19 aa, Artificial Sequence
  Synthetic
AKGGLYDSSGYYPHYGMDV

SEQ ID NO: 8915 - protein, 107 aa, Artificial Sequence; identical to SEQ ID NO: 6915
  Synthetic

SEQ ID NO: 8916 - protein, 9 aa, Artificial Sequence
  Synthetic
QQYDNLPLA

SEQ ID NO: 8917 - protein, 116 aa, Artificial Sequence; identical to SEQ ID NO: 6917
  Synthetic

SEQ ID NO: 8918 - protein, 10 aa, Artificial Sequence
  Synthetic
ARDLSAAFDI

SEQ ID NO: 8919 - protein, 107 aa, Artificial Sequence; identical to SEQ ID NO: 6919
  Synthetic

SEQ ID NO: 8920 - protein, 9 aa, Artificial Sequence
  Synthetic
QQLNSYPPA

SEQ ID NO: 8921 - protein, 125 aa, Artificial Sequence; identical to SEQ ID NO: 6921
  Synthetic

SEQ ID NO: 8922 - protein, 18 aa, Artificial Sequence
  Synthetic
ARGVNPDDILTGVDAFDI

SEQ ID NO: 8923 - protein, 107 aa, Artificial Sequence; identical to SEQ ID NO: 6923
  Synthetic

SEQ ID NO: 8924 - protein, 9 aa, Artificial Sequence
  Synthetic
QQHNSSPLT

SEQ ID NO: 8925 - protein, 132 aa, Artificial Sequence; identical to SEQ ID NO: 6925
  Synthetic

SEQ ID NO: 8926 - protein, 25 aa, Artificial Sequence
  Synthetic
ARGPRSPSDWCSGGSCYDDQNWFDP

SEQ ID NO: 8927 - protein, 107 aa, Artificial Sequence; identical to SEQ ID NO: 6927
  Synthetic

SEQ ID NO: 8928 - protein, 9 aa, Artificial Sequence
  Synthetic
QQSYSTLIT

SEQ ID NO: 8929 - protein, 124 aa, Artificial Sequence; identical to SEQ ID NO: 6929
  Synthetic

SEQ ID NO: 8930 - protein, 17 aa, Artificial Sequence
  Synthetic
ARDFELWFGELRGWFDP

SEQ ID NO: 8931 - protein, 108 aa, Artificial Sequence; identical to SEQ ID NO: 6931
  Synthetic

SEQ ID NO: 8932 - protein, 10 aa, Artificial Sequence
  Synthetic
QQYNNWPPIT

SEQ ID NO: 8933 - protein, 125 aa, Artificial Sequence; identical to SEQ ID NO: 6933
  Synthetic

SEQ ID NO: 8934 - protein, 18 aa, Artificial Sequence
  Synthetic
AREGARVGATYDTYYFDY

SEQ ID NO: 8935 - protein, 109 aa, Artificial Sequence; identical to SEQ ID NO: 6935
  Synthetic

SEQ ID NO: 8936 - protein, 11 aa, Artificial Sequence
  Synthetic
QQRNNWPPEWT

SEQ ID NO: 8937 - protein, 124 aa, Artificial Sequence; identical to SEQ ID NO: 6937
  Synthetic

SEQ ID NO: 8938 - protein, 18 aa, Artificial Sequence
  Synthetic
ARTDIVVVPAARGFYFDY

SEQ ID NO: 8939 - protein, 106 aa, Artificial Sequence; identical to SEQ ID NO: 6939
  Synthetic

SEQ ID NO: 8940 - protein, 8 aa, Artificial Sequence
  Synthetic
QQYNSYGT

SEQ ID NO: 8941 - protein, 117 aa, Artificial Sequence; identical to SEQ ID NO: 6941
  Synthetic

SEQ ID NO: 8942 - protein, 11 aa, Artificial Sequence
  Synthetic
ARDYGDYYFDY

SEQ ID NO: 8943 - protein, 108 aa, Artificial Sequence; identical to SEQ ID NO: 6943
  Synthetic

SEQ ID NO: 8944 - protein, 9 aa, Artificial Sequence
  Synthetic
QQYGSSPRT

SEQ ID NO: 8945 - protein, 120 aa, Artificial Sequence; identical to SEQ ID NO: 6945
  Synthetic

SEQ ID NO: 8946 - protein, 13 aa, Artificial Sequence
  Synthetic
ALTTVTTGRWFDP

SEQ ID NO: 8947 - protein, 112 aa, Artificial Sequence; identical to SEQ ID NO: 6947
  Synthetic

SEQ ID NO: 8948 - protein, 9 aa, Artificial Sequence
  Synthetic
MQGTHWLWT

SEQ ID NO: 8949 - protein, 125 aa, Artificial Sequence; identical to SEQ ID NO: 6921
  Synthetic

SEQ ID NO: 8950 - protein, 18 aa, Artificial Sequence
  Synthetic
ARGVNPDDILTGVDAFDI

SEQ ID NO: 8951 - protein, 107 aa, Artificial Sequence; identical to SEQ ID NO: 6923
  Synthetic

SEQ ID NO: 8952 - protein, 9 aa, Artificial Sequence
  Synthetic
QQHNSSPLT

SEQ ID NO: 8953 - protein, 123 aa, Artificial Sequence; identical to SEQ ID NO: 6953
  Synthetic

SEQ ID NO: 8954 - protein, 16 aa, Artificial Sequence
  Synthetic
ARHRHPGITMIVALDY

SEQ ID NO: 8955 - protein, 105 aa, Artificial Sequence; identical to SEQ ID NO: 6955
  Synthetic

SEQ ID NO: 8956 - protein, 8 aa, Artificial Sequence
  Synthetic
QQYDNVPL

SEQ ID NO: 8957 - protein, 117 aa, Artificial Sequence; identical to SEQ ID NO: 6957
  Synthetic

SEQ ID NO: 8958 - protein, 11 aa, Artificial Sequence
  Synthetic
ARDWGEYYFDY

SEQ ID NO: 8959 - protein, 107 aa, Artificial Sequence; identical to SEQ ID NO: 6959
  Synthetic

SEQ ID NO: 8960 - protein, 9 aa, Artificial Sequence
  Synthetic
QQYGSSPRT

SEQ ID NO: 8961 - protein, 123 aa, Artificial Sequence; identical to SEQ ID NO: 6961
  Synthetic

SEQ ID NO: 8962 - protein, 17 aa, Artificial Sequence
  Synthetic
ARKPLLYSNLSPGAFDI

SEQ ID NO: 8963 - protein, 108 aa, Artificial Sequence; identical to SEQ ID NO: 6963
  Synthetic

SEQ ID NO: 8964 - protein, 9 aa, Artificial Sequence
  Synthetic
QQYGTTPRT

SEQ ID NO: 8965 - protein, 123 aa, Artificial Sequence; identical to SEQ ID NO: 6965
  Synthetic

SEQ ID NO: 8966 - protein, 16 aa, Artificial Sequence
  Synthetic
AKAGYSYGYPQQYFDY

SEQ ID NO: 8967 - protein, 107 aa, Artificial Sequence; identical to SEQ ID NO: 6967
  Synthetic

SEQ ID NO: 8968 - protein, 9 aa, Artificial Sequence
  Synthetic
QQYNSYSYT

SEQ ID NO: 8969 - protein, 118 aa, Artificial Sequence; identical to SEQ ID NO: 6969
  Synthetic

SEQ ID NO: 8970 - protein, 12 aa, Artificial Sequence
  Synthetic
ARDLRGPGTFDI

SEQ ID NO: 8971 - protein, 108 aa, Artificial Sequence; identical to SEQ ID NO: 6971
  Synthetic

SEQ ID NO: 8972 - protein, 10 aa, Artificial Sequence
  Synthetic
QQYDNLPRVT

SEQ ID NO: 8973 - protein, 118 aa, Artificial Sequence; identical to SEQ ID NO: 6973
  Synthetic

SEQ ID NO: 8974 - protein, 11 aa, Artificial Sequence
  Synthetic
ARHISSGWYDY

SEQ ID NO: 8975 - protein, 106 aa, Artificial Sequence; identical to SEQ ID NO: 6975
  Synthetic

SEQ ID NO: 8976 - protein, 9 aa, Artificial Sequence
  Synthetic
QQYDNLPYT

SEQ ID NO: 8977 - protein, 123 aa, Artificial Sequence; identical to SEQ ID NO: 6977
  Synthetic

SEQ ID NO: 8978 - protein, 16 aa, Artificial Sequence
  Synthetic
AAPHCSSTSCFDAFDI

SEQ ID NO: 8979 - protein, 108 aa, Artificial Sequence; identical to SEQ ID NO: 6979
  Synthetic

SEQ ID NO: 8980 - protein, 9 aa, Artificial Sequence
  Synthetic
QQYGNSPWT

SEQ ID NO: 8981 - protein, 117 aa, Artificial Sequence; identical to SEQ ID NO: 6981
  Synthetic

SEQ ID NO: 8982 - protein, 11 aa, Artificial Sequence
  Synthetic
ARTMDGDYFDY

SEQ ID NO: 8983 - protein, 107 aa, Artificial Sequence; identical to SEQ ID NO: 6983
  Synthetic

SEQ ID NO: 8984 - protein, 9 aa, Artificial Sequence
  Synthetic
QKYNSAPLT

SEQ ID NO: 8985 - protein, 123 aa, Artificial Sequence; identical to SEQ ID NO: 6985
  Synthetic

SEQ ID NO: 8986 - protein, 16 aa, Artificial Sequence
  Synthetic
ARDSPSQIVVVPVFDY

SEQ ID NO: 8987 - protein, 108 aa, Artificial Sequence; identical to SEQ ID NO: 6987
  Synthetic

SEQ ID NO: 8988 - protein, 10 aa, Artificial Sequence
  Synthetic
QQSYSTLALT

SEQ ID NO: 8989 - protein, 123 aa, Artificial Sequence; identical to SEQ ID NO: 6989
  Synthetic

SEQ ID NO: 8990 - protein, 16 aa, Artificial Sequence
  Synthetic
AKALSSTGFLVVYFDY

SEQ ID NO: 8991 - protein, 108 aa, Artificial Sequence; identical to SEQ ID NO: 6991
  Synthetic

SEQ ID NO: 8992 - protein, 10 aa, Artificial Sequence
  Synthetic
QQYNNWLSLT

SEQ ID NO: 8993 - protein, 128 aa, Artificial Sequence; identical to SEQ ID NO: 6993
  Synthetic

SEQ ID NO: 8994 - protein, 21 aa, Artificial Sequence
  Synthetic
ARSFRDDPRIAVAGPADAFDI

SEQ ID NO: 8995 - protein, 107 aa, Artificial Sequence; identical to SEQ ID NO: 6995
  Synthetic

SEQ ID NO: 8996 - protein, 9 aa, Artificial Sequence
  Synthetic
QQYNSYPYT

SEQ ID NO: 8997 - protein, 126 aa, Artificial Sequence; identical to SEQ ID NO: 6997
  Synthetic

SEQ ID NO: 8998 - protein, 19 aa, Artificial Sequence
  Synthetic
ARAGLLTKNIVATIGCFDP

SEQ ID NO: 8999 - protein, 113 aa, Artificial Sequence; identical to SEQ ID NO: 2359
  Synthetic
  misc_feature (15)..(15): Xaa can be any naturally occurring amino acid

SEQ ID NO: 9000 - protein, 9 aa, Artificial Sequence
  Synthetic
QQYYSTPLT

SEQ ID NO: 9001 - protein, 129 aa, Artificial Sequence; identical to SEQ ID NO: 7001
  Synthetic

SEQ ID NO: 9002 - protein, 22 aa, Artificial Sequence
  Synthetic
ARVGHARGVITGGDYFYYGMDV

SEQ ID NO: 9003 - protein, 107 aa, Artificial Sequence; identical to SEQ ID NO: 7003
  Synthetic

SEQ ID NO: 9004 - protein, 8 aa, Artificial Sequence
  Synthetic
QQYGSSPT

SEQ ID NO: 9005 - protein, 127 aa, Artificial Sequence; identical to SEQ ID NO: 7005
  Synthetic

SEQ ID NO: 9006 - protein, 20 aa, Artificial Sequence
  Synthetic
VETNLWFGEDNYYYYYGMDV

SEQ ID NO: 9007 - protein, 109 aa, Artificial Sequence; identical to SEQ ID NO: 7007
  Synthetic

SEQ ID NO: 9008 - protein, 10 aa, Artificial Sequence
  Synthetic
QQYGSSPPWT

SEQ ID NO: 9009 - protein, 117 aa, Artificial Sequence; identical to SEQ ID NO: 7009
  Synthetic

SEQ ID NO: 9010 - protein, 11 aa, Artificial Sequence
  Synthetic
ARDYGDFYFDY

SEQ ID NO: 9011 - protein, 107 aa, Artificial Sequence; identical to SEQ ID NO: 7011
  Synthetic

SEQ ID NO: 9012 - protein, 9 aa, Artificial Sequence
  Synthetic
QQYYNWPRT

SEQ ID NO: 9013 - protein, 123 aa, Artificial Sequence; identical to SEQ ID NO: 7013
  Synthetic

SEQ ID NO: 9014 - protein, 17 aa, Artificial Sequence
  Synthetic
ARKTLLFSDFSPGAFDI

SEQ ID NO: 9015 - protein, 107 aa, Artificial Sequence; identical to SEQ ID NO: 7015
  Synthetic

SEQ ID NO: 9016 - protein, 9 aa, Artificial Sequence
  Synthetic
QQYGTTPRT

SEQ ID NO: 9017 - protein, 116 aa, Artificial Sequence; identical to SEQ ID NO: 7017
  Synthetic

SEQ ID NO: 9018 - protein, 10 aa, Artificial Sequence
  Synthetic
ATDLTSGRGP

SEQ ID NO: 9019 - protein, 107 aa, Artificial Sequence; identical to SEQ ID NO: 7019
  Synthetic

SEQ ID NO: 9020 - protein, 9 aa, Artificial Sequence
  Synthetic
LQDYNYPKT

SEQ ID NO: 9021 - protein, 115 aa, Artificial Sequence; identical to SEQ ID NO: 7021
  Synthetic

SEQ ID NO: 9022 - protein, 9 aa, Artificial Sequence
  Synthetic
AREVAAFDI

SEQ ID NO: 9023 - protein, 107 aa, Artificial Sequence; identical to SEQ ID NO: 7023
  Synthetic

SEQ ID NO: 9024 - protein, 9 aa, Artificial Sequence
  Synthetic
QQLNSYPPG

SEQ ID NO: 9025 - protein, 130 aa, Artificial Sequence; identical to SEQ ID NO: 7025
  Synthetic
  misc_feature (76)..(76): Xaa can be any naturally occurring amino acid

SEQ ID NO: 9026 - protein, 22 aa, Artificial Sequence
  Synthetic
AWRYSSSWYTVDNKKGDYYFDY

SEQ ID NO: 9027 - protein, 112 aa, Artificial Sequence; identical to SEQ ID NO: 7027
  Synthetic

SEQ ID NO: 9028 - protein, 9 aa, Artificial Sequence
  Synthetic
MQALQTPRT

SEQ ID NO: 9029 - protein, 127 aa, Artificial Sequence; identical to SEQ ID NO: 7029
  Synthetic

SEQ ID NO: 9030 - protein, 20 aa, Artificial Sequence
  Synthetic
ARGGRYCSSTSCYSHVGFDP

SEQ ID NO: 9031 - protein, 107 aa, Artificial Sequence; identical to SEQ ID NO: 7031
  Synthetic

SEQ ID NO: 9032 - protein, 9 aa, Artificial Sequence
  Synthetic
QQLNSYPIT

SEQ ID NO: 9033 - protein, 117 aa, Artificial Sequence; identical to SEQ ID NO: 6957
  Synthetic

SEQ ID NO: 9034 - protein, 11 aa, Artificial Sequence
  Synthetic
ARDWGEYYFDY

SEQ ID NO: 9035 - protein, 107 aa, Artificial Sequence; identical to SEQ ID NO: 6959
  Synthetic

SEQ ID NO: 9036 - protein, 9 aa, Artificial Sequence
  Synthetic
QQYGSSPRT

SEQ ID NO: 9037 - protein, 129 aa, Artificial Sequence; identical to SEQ ID NO: 7037
  Synthetic

SEQ ID NO: 9038 - protein, 22 aa, Artificial Sequence
  Synthetic
ARDQGYCSSTSCYDGYYYYMDV

SEQ ID NO: 9039 - protein, 107 aa, Artificial Sequence; identical to SEQ ID NO: 7039
  Synthetic

SEQ ID NO: 9040 - protein, 9 aa, Artificial Sequence
  Synthetic
QQSYSAPWT

SEQ ID NO: 9041 - protein, 117 aa, Artificial Sequence; identical to SEQ ID NO: 7041
  Synthetic

SEQ ID NO: 9042 - protein, 11 aa, Artificial Sequence
  Synthetic
ARDYGDYYFDY

SEQ ID NO: 9043 - protein, 108 aa, Artificial Sequence; identical to SEQ ID NO: 1031
  Synthetic

SEQ ID NO: 9044 - protein, 9 aa, Artificial Sequence
  Synthetic
QQYGSSPRT

SEQ ID NO: 9045 - protein, 120 aa, Artificial Sequence; identical to SEQ ID NO: 6785
  Synthetic

SEQ ID NO: 9046 - protein, 11 aa, Artificial Sequence
  Synthetic
TRWDGWSQHDY

SEQ ID NO: 9047 - protein, 111 aa, Artificial Sequence; identical to SEQ ID NO: 7047
  Synthetic

SEQ ID NO: 9048 - protein, 9 aa, Artificial Sequence
  Synthetic
MQVLQIPYT

SEQ ID NO: 9049 - protein, 122 aa, Artificial Sequence; identical to SEQ ID NO: 7049
  Synthetic

SEQ ID NO: 9050 - protein, 15 aa, Artificial Sequence
  Synthetic
ASFHVAYGDYIPFDY

SEQ ID NO: 9051 - protein, 109 aa, Artificial Sequence; identical to SEQ ID NO: 7051
  Synthetic

SEQ ID NO: 9052 - protein, 10 aa, Artificial Sequence
  Synthetic
QQYGRSPTWT

SEQ ID NO: 9053 - protein, 128 aa, Artificial Sequence; identical to SEQ ID NO: 7053
  Synthetic

SEQ ID NO: 9054 - protein, 21 aa, Artificial Sequence
  Synthetic
AREPQINPYYDILTGYRAFDY

SEQ ID NO: 9055 - protein, 107 aa, Artificial Sequence; identical to SEQ ID NO: 7055
  Synthetic

SEQ ID NO: 9056 - protein, 8 aa, Artificial Sequence
  Synthetic
QQYGSSLT

SEQ ID NO: 9057 - protein, 117 aa, Artificial Sequence; identical to SEQ ID NO: 339
  Synthetic

SEQ ID NO: 9058 - protein, 11 aa, Artificial Sequence
  Synthetic
ARDLGTGLFDY

SEQ ID NO: 9059 - protein, 108 aa, Artificial Sequence; identical to SEQ ID NO: 340
  Synthetic

SEQ ID NO: 9060 - protein, 10 aa, Artificial Sequence
  Synthetic
QQLDSYPPGT

SEQ ID NO: 9061 - protein, 123 aa, Artificial Sequence; identical to SEQ ID NO: 7061
  Synthetic

SEQ ID NO: 9062 - protein, 17 aa, Artificial Sequence
  Synthetic
ARKPLLHSDLSPGAFDI

SEQ ID NO: 9063 - protein, 107 aa, Artificial Sequence; identical to SEQ ID NO: 7063
  Synthetic

SEQ ID NO: 9064 - protein, 9 aa, Artificial Sequence
  Synthetic
QQYVTTPRT

SEQ ID NO: 9065 - protein, 118 aa, Artificial Sequence; identical to SEQ ID NO: 7065
  Synthetic

SEQ ID NO: 9066 - protein, 12 aa, Artificial Sequence
  Synthetic
AREGMGMAAAGT

SEQ ID NO: 9067 - protein, 107 aa, Artificial Sequence; identical to SEQ ID NO: 7067
  Synthetic

SEQ ID NO: 9068 - protein, 9 aa, Artificial Sequence
  Synthetic
QQYDNLPQT

SEQ ID NO: 9069 - protein, 122 aa, Artificial Sequence; identical to SEQ ID NO: 299
  Synthetic

SEQ ID NO: 9070 - protein, 16 aa, Artificial Sequence
  Synthetic
ARVRYDSSGYFWSLDY

SEQ ID NO: 9071 - protein, 108 aa, Artificial Sequence; identical to SEQ ID NO: 300
  Synthetic

SEQ ID NO: 9072 - protein, 10 aa, Artificial Sequence
  Synthetic
QQSYSTPQYT

SEQ ID NO: 9073 - protein, 127 aa, Artificial Sequence; identical to SEQ ID NO: 7073
  Synthetic

SEQ ID NO: 9074 - protein, 20 aa, Artificial Sequence
  Synthetic
AKSLGPYCSGGNCYSSYFDY

SEQ ID NO: 9075 - protein, 106 aa, Artificial Sequence; identical to SEQ ID NO: 7075
  Synthetic

SEQ ID NO: 9076 - protein, 8 aa, Artificial Sequence
  Synthetic
QQYNSYST

SEQ ID NO: 9077 - protein, 127 aa, Artificial Sequence; identical to SEQ ID NO: 7077
  Synthetic

SEQ ID NO: 9078 - protein, 20 aa, Artificial Sequence
  Synthetic
AKKGGGAYCGGDCYLGEFDY

SEQ ID NO: 9079 - protein, 108 aa, Artificial Sequence; identical to SEQ ID NO: 7079
  Synthetic

SEQ ID NO: 9080 - protein, 9 aa, Artificial Sequence
  Synthetic
QQYGTSPST

SEQ ID NO: 9081 - protein, 124 aa, Artificial Sequence; identical to SEQ ID NO: 7081
  Synthetic

SEQ ID NO: 9082 - protein, 17 aa, Artificial Sequence
  Synthetic
AKGLIAELVGGGWYFDY

SEQ ID NO: 9083 - protein, 108 aa, Artificial Sequence; identical to SEQ ID NO: 7083
  Synthetic

SEQ ID NO: 9084 - protein, 10 aa, Artificial Sequence
  Synthetic
QQRSNWPPLT

SEQ ID NO: 9085 - protein, 127 aa, Artificial Sequence; identical to SEQ ID NO: 7085
  Synthetic

SEQ ID NO: 9086 - protein, 20 aa, Artificial Sequence
  Synthetic
AKQAGPYCSGGTCYPGTLDY

SEQ ID NO: 9087 - protein, 107 aa, Artificial Sequence; identical to SEQ ID NO: 7087
  Synthetic

SEQ ID NO: 9088 - protein, 9 aa, Artificial Sequence
  Synthetic
QQYDNVPLT

SEQ ID NO: 9089 - protein, 123 aa, Artificial Sequence; identical to SEQ ID NO: 7089
  Synthetic

SEQ ID NO: 9090 - protein, 17 aa, Artificial Sequence
  Synthetic
ARKPLLYSDFSPGAFDI

SEQ ID NO: 9091 - protein, 107 aa, Artificial Sequence; identical to SEQ ID NO: 7091
  Synthetic

SEQ ID NO: 9092 - protein, 9 aa, Artificial Sequence
  Synthetic
QQYTTTPRT

SEQ ID NO: 9093 - protein, 128 aa, Artificial Sequence; identical to SEQ ID NO: 7093
  Synthetic

SEQ ID NO: 9094 - protein, 22 aa, Artificial Sequence
  Synthetic
ARGVSGVVRGVIRSFYYYGLDV

SEQ ID NO: 9095 - protein, 108 aa, Artificial Sequence; identical to SEQ ID NO: 7095
  Synthetic

SEQ ID NO: 9096 - protein, 10 aa, Artificial Sequence
  Synthetic
QQSYITPGWT

SEQ ID NO: 9097 - protein, 125 aa, Artificial Sequence; identical to SEQ ID NO: 7097
  Synthetic

SEQ ID NO: 9098 - protein, 18 aa, Artificial Sequence
  Synthetic
ARVAIRVVVPSATYYFDY

SEQ ID NO: 9099 - protein, 109 aa, Artificial Sequence; identical to SEQ ID NO: 7099
  Synthetic

SEQ ID NO: 9100 - protein, 11 aa, Artificial Sequence
  Synthetic
QQRSNWPQGFT

SEQ ID NO: 9101 - protein, 123 aa, Artificial Sequence; identical to SEQ ID NO: 7101
  Synthetic

SEQ ID NO: 9102 - protein, 16 aa, Artificial Sequence
  Synthetic
ATGGGSYFSPRIYFDY

SEQ ID NO: 9103 - protein, 108 aa, Artificial Sequence; identical to SEQ ID NO: 1227
  Synthetic

SEQ ID NO: 9104 - protein, 10 aa, Artificial Sequence
  Synthetic
QQYDNLPPYT

SEQ ID NO: 9105 - protein, 120 aa, Artificial Sequence; identical to SEQ ID NO: 7105
  Synthetic

SEQ ID NO: 9106 - protein, 11 aa, Artificial Sequence
  Synthetic
TRWDGWSQHDY

SEQ ID NO: 9107 - protein, 111 aa, Artificial Sequence; identical to SEQ ID NO: 7107
  Synthetic

SEQ ID NO: 9108 - protein, 9 aa, Artificial Sequence
  Synthetic
MQVLQVPYT

SEQ ID NO: 9109 - protein, 118 aa, Artificial Sequence; identical to SEQ ID NO: 7109
  Synthetic

SEQ ID NO: 9110 - protein, 12 aa, Artificial Sequence
  Synthetic
AREGMGIAAAGT

SEQ ID NO: 9111 - protein, 107 aa, Artificial Sequence; identical to SEQ ID NO: 7067
  Synthetic

SEQ ID NO: 9112 - protein, 9 aa, Artificial Sequence
  Synthetic
QQYDNLPQT

SEQ ID NO: 9113 - protein, 120 aa, Artificial Sequence; identical to SEQ ID NO: 315
  Synthetic

SEQ ID NO: 9114 - protein, 13 aa, Artificial Sequence
  Synthetic
AKSWWLSENWFDP

SEQ ID NO: 9115 - protein, 107 aa, Artificial Sequence; identical to SEQ ID NO: 316
  Synthetic

SEQ ID NO: 9116 - protein, 9 aa, Artificial Sequence
  Synthetic
QQYNNWPLT

SEQ ID NO: 9117 - protein, 117 aa, Artificial Sequence; identical to SEQ ID NO: 325
  Synthetic

SEQ ID NO: 9118 - protein, 11 aa, Artificial Sequence
  Synthetic
ARDLVVWGMDV

SEQ ID NO: 9119 - protein, 107 aa, Artificial Sequence; identical to SEQ ID NO: 326
  Synthetic

SEQ ID NO: 9120 - protein, 9 aa, Artificial Sequence
  Synthetic
QLLNSYPYT

SEQ ID NO: 9121 - protein, 123 aa, Artificial Sequence; identical to SEQ ID NO: 7121
  Synthetic

SEQ ID NO: 9122 - protein, 16 aa, Artificial Sequence
  Synthetic
AAPYCSGGSCSDAFDI

SEQ ID NO: 9123 - protein, 108 aa, Artificial Sequence; identical to SEQ ID NO: 3387
  Synthetic

SEQ ID NO: 9124 - protein, 9 aa, Artificial Sequence
  Synthetic
QQYGSSPWT

SEQ ID NO: 9125 - protein, 128 aa, Artificial Sequence; identical to SEQ ID NO: 7125
  Synthetic

SEQ ID NO: 9126 - protein, 21 aa, Artificial Sequence
  Synthetic
ARSFRDDPRIAVAGPADAFDI

SEQ ID NO: 9127 - protein, 107 aa, Artificial Sequence; identical to SEQ ID NO: 7127
  Synthetic

SEQ ID NO: 9128 - protein, 9 aa, Artificial Sequence
  Synthetic
QQYNSYPYT

SEQ ID NO: 9129 - protein, 117 aa, Artificial Sequence; identical to SEQ ID NO: 7129
  Synthetic

SEQ ID NO: 9130 - protein, 11 aa, Artificial Sequence
  Synthetic
VRDYGDFYFDY

SEQ ID NO: 9131 - protein, 108 aa, Artificial Sequence; identical to SEQ ID NO: 7131
  Synthetic

SEQ ID NO: 9132 - protein, 9 aa, Artificial Sequence
  Synthetic
QQYGSSPRT

SEQ ID NO: 9133 - protein, 117 aa, Artificial Sequence; identical to SEQ ID NO: 7133
  Synthetic

SEQ ID NO: 9134 - protein, 11 aa, Artificial Sequence
  Synthetic
ARDYGDLYFDY

SEQ ID NO: 9135 - protein, 108 aa, Artificial Sequence; identical to SEQ ID NO: 7135
  Synthetic

SEQ ID NO: 9136 - protein, 9 aa, Artificial Sequence
  Synthetic
QQYGSSPRT

SEQ ID NO: 9137 - protein, 128 aa, Artificial Sequence; identical to SEQ ID NO: 7137
  Synthetic

SEQ ID NO: 9138 - protein, 19 aa, Artificial Sequence
  Synthetic
TKPHAHCGGDCYSRDWFDP

SEQ ID NO: 9139 - protein, 108 aa, Artificial Sequence; identical to SEQ ID NO: 7139
  Synthetic

SEQ ID NO: 9140 - protein, 10 aa, Artificial Sequence
  Synthetic
QQSYSTPPFT

SEQ ID NO: 9141 - protein, 125 aa, Artificial Sequence; identical to SEQ ID NO: 333
  Synthetic

SEQ ID NO: 9142 - protein, 18 aa, Artificial Sequence
  Synthetic
ARDVIVSMVRGVIFRMDV

SEQ ID NO: 9143 - protein, 110 aa, Artificial Sequence; identical to SEQ ID NO: 334
  Synthetic

SEQ ID NO: 9144 - protein, 11 aa, Artificial Sequence
  Synthetic
AAWDDSLNGVV

SEQ ID NO: 9145 - protein, 121 aa, Artificial Sequence; identical to SEQ ID NO: 7145
  Synthetic

SEQ ID NO: 9146 - protein, 14 aa, Artificial Sequence
  Synthetic
AREDYYDSSGSFDY

SEQ ID NO: 9147 - protein, 110 aa, Artificial Sequence; identical to SEQ ID NO: 7147
  Synthetic

SEQ ID NO: 9148 - protein, 10 aa, Artificial Sequence
  Synthetic
SSYTSSSTWV

SEQ ID NO: 9149 - protein, 123 aa, Artificial Sequence; identical to SEQ ID NO: 7149
  Synthetic

SEQ ID NO: 9150 - protein, 15 aa, Artificial Sequence
  Synthetic
AGGTNPQWLDSTFDY

SEQ ID NO: 9151 - protein, 110 aa, Artificial Sequence; identical to SEQ ID NO: 7151
  Synthetic

SEQ ID NO: 9152 - protein, 10 aa, Artificial Sequence
  Synthetic
SSYTSSSTYV

SEQ ID NO: 9153 - protein, 120 aa, Artificial Sequence; identical to SEQ ID NO: 7153
  Synthetic

SEQ ID NO: 9154 - protein, 13 aa, Artificial Sequence
  Synthetic
ARRPSSYSGWFDP

SEQ ID NO: 9155 - protein, 110 aa, Artificial Sequence; identical to SEQ ID NO: 7155
  Synthetic

SEQ ID NO: 9156 - protein, 11 aa, Artificial Sequence
  Synthetic
AAWDDSLNGLV

SEQ ID NO: 9157 - protein, 125 aa, Artificial Sequence; identical to SEQ ID NO: 7157
  Synthetic

SEQ ID NO: 9158 - protein, 18 aa, Artificial Sequence
  Synthetic
ATAHPRRIQGVFFLGPGV

SEQ ID NO: 9159 - protein, 110 aa, Artificial Sequence; identical to SEQ ID NO: 7159
  Synthetic

SEQ ID NO: 9160 - protein, 11 aa, Artificial Sequence
  Synthetic
AAWDDSLNGVV

SEQ ID NO: 9161 - protein, 123 aa, Artificial Sequence; identical to SEQ ID NO: 7161
  Synthetic

SEQ ID NO: 9162 - protein, 16 aa, Artificial Sequence
  Synthetic
ARDSSGYYYVSNWFDP

SEQ ID NO: 9163 - protein, 111 aa, Artificial Sequence; identical to SEQ ID NO: 7163
  Synthetic

SEQ ID NO: 9164 - protein, 11 aa, Artificial Sequence
  Synthetic
QSYDSSLSGVV

SEQ ID NO: 9165 - protein, 118 aa, Artificial Sequence; identical to SEQ ID NO: 7165
  Synthetic

SEQ ID NO: 9166 - protein, 12 aa, Artificial Sequence
  Synthetic
ARGEGWDLPYDY

SEQ ID NO: 9167 - protein, 111 aa, Artificial Sequence; identical to SEQ ID NO: 7167
  Synthetic

SEQ ID NO: 9168 - protein, 11 aa, Artificial Sequence
  Synthetic
SSYAGSNNFVV

SEQ ID NO: 9169 - protein, 119 aa, Artificial Sequence; identical to SEQ ID NO: 7169
  Synthetic

SEQ ID NO: 9170 - protein, 12 aa, Artificial Sequence
  Synthetic
AVQLWLRGNFDY

SEQ ID NO: 9171 - protein, 111 aa, Artificial Sequence; identical to SEQ ID NO: 7171
  Synthetic

SEQ ID NO: 9172 - protein, 10 aa, Artificial Sequence
  Synthetic
QSYDSSNHVV

SEQ ID NO: 9173 - protein, 118 aa, Artificial Sequence; identical to SEQ ID NO: 7173
  Synthetic

SEQ ID NO: 9174 - protein, 12 aa, Artificial Sequence
  Synthetic
ARGEGWDLPYDY

SEQ ID NO: 9175 - protein, 111 aa, Artificial Sequence; identical to SEQ ID NO: 7175
  Synthetic

SEQ ID NO: 9176 - protein, 11 aa, Artificial Sequence
  Synthetic
SSYAGSNNFVL

SEQ ID NO: 9177 - protein, 121 aa, Artificial Sequence; identical to SEQ ID NO: 7177
  Synthetic

SEQ ID NO: 9178 - protein, 14 aa, Artificial Sequence
  Synthetic
ARDPQRDPADYFDY

SEQ ID NO: 9179 - protein, 105 aa, Artificial Sequence; identical to SEQ ID NO: 7179
  Synthetic

SEQ ID NO: 9180 - protein, 8 aa, Artificial Sequence
  Synthetic
QVWDSSRV

SEQ ID NO: 9181 - protein, 120 aa, Artificial Sequence; identical to SEQ ID NO: 7181
  Synthetic

SEQ ID NO: 9182 - protein, 13 aa, Artificial Sequence
  Synthetic
VRDGGRPGDAFDI

SEQ ID NO: 9183 - protein, 110 aa, Artificial Sequence; identical to SEQ ID NO: 7183
  Synthetic

SEQ ID NO: 9184 - protein, 10 aa, Artificial Sequence
  Synthetic
NSYTSSSTRV

SEQ ID NO: 9185 - protein, 127 aa, Artificial Sequence; identical to SEQ ID NO: 7185
  Synthetic

SEQ ID NO: 9186 - protein, 19 aa, Artificial Sequence
  Synthetic
ATRGGYYDSSGYYALAFDI

SEQ ID NO: 9187 - protein, 111 aa, Artificial Sequence; identical to SEQ ID NO: 7187
  Synthetic

SEQ ID NO: 9188 - protein, 11 aa, Artificial Sequence
  Synthetic
SSYTSSSTVWV

SEQ ID NO: 9189 - protein, 121 aa, Artificial Sequence; identical to SEQ ID NO: 7189
  Synthetic

SEQ ID NO: 9190 - protein, 14 aa, Artificial Sequence
  Synthetic
AKEEVLPAVEYFQH

SEQ ID NO: 9191 - protein, 109 aa, Artificial Sequence; identical to SEQ ID NO: 7191
  Synthetic

SEQ ID NO: 9192 - protein, 12 aa, Artificial Sequence
  Synthetic
QVWDGSSDHHVV

SEQ ID NO: 9193 - protein, 122 aa, Artificial Sequence; identical to SEQ ID NO: 7193
  Synthetic

SEQ ID NO: 9194 - protein, 15 aa, Artificial Sequence
  Synthetic
ARAIAVAGTSGEFDY

SEQ ID NO: 9195 - protein, 111 aa, Artificial Sequence; identical to SEQ ID NO: 7195
  Synthetic

SEQ ID NO: 9196 - protein, 12 aa, Artificial Sequence
  Synthetic
AAWDDSLNGHVV

SEQ ID NO: 9197 - protein, 119 aa, Artificial Sequence; identical to SEQ ID NO: 7197
  Synthetic

SEQ ID NO: 9198 - protein, 12 aa, Artificial Sequence
  Synthetic
ARSQGWLQLNDY

SEQ ID NO: 9199 - protein, 112 aa, Artificial Sequence; identical to SEQ ID NO: 7199
  Synthetic

SEQ ID NO: 9200 - protein, 11 aa, Artificial Sequence
  Synthetic
QSYDSSTPNCV

SEQ ID NO: 9201 - protein, 120 aa, Artificial Sequence; identical to SEQ ID NO: 7201
  Synthetic

SEQ ID NO: 9202 - protein, 13 aa, Artificial Sequence
  Synthetic
ARELIAVAGIFDY

SEQ ID NO: 9203 - protein, 105 aa, Artificial Sequence; identical to SEQ ID NO: 7203
  Synthetic

SEQ ID NO: 9204 - protein, 8 aa, Artificial Sequence
  Synthetic
QVWDSSWV

SEQ ID NO: 9205 - protein, 122 aa, Artificial Sequence; identical to SEQ ID NO: 7205
  Synthetic

SEQ ID NO: 9206 - protein, 15 aa, Artificial Sequence
  Synthetic
ARDLAFSMVRAPGDY

SEQ ID NO: 9207 - protein, 110 aa, Artificial Sequence; identical to SEQ ID NO: 2967
  Synthetic

SEQ ID NO: 9208 - protein, 10 aa, Artificial Sequence
  Synthetic
CSYAGSSTWV

SEQ ID NO: 9209 - protein, 117 aa, Artificial Sequence; identical to SEQ ID NO: 7209
  Synthetic

SEQ ID NO: 9210 - protein, 11 aa, Artificial Sequence
  Synthetic
ARGDGELFFDH

SEQ ID NO: 9211 - protein, 110 aa, Artificial Sequence; identical to SEQ ID NO: 7211
  Synthetic

SEQ ID NO: 9212 - protein, 10 aa, Artificial Sequence
  Synthetic
QSYDSSLYAV

SEQ ID NO: 9213 - protein, 122 aa, Artificial Sequence; identical to SEQ ID NO: 7213
  Synthetic

SEQ ID NO: 9214 - protein, 15 aa, Artificial Sequence
  Synthetic
ARGEAVAGTTGFFDY

SEQ ID NO: 9215 - protein, 111 aa, Artificial Sequence; identical to SEQ ID NO: 7215
  Synthetic

SEQ ID NO: 9216 - protein, 12 aa, Artificial Sequence
  Synthetic
AAWDDSLSGFVV

SEQ ID NO: 9217 - protein, 123 aa, Artificial Sequence; identical to SEQ ID NO: 7217
  Synthetic

SEQ ID NO: 9218 - protein, 15 aa, Artificial Sequence
  Synthetic
ASAPYLNWNDWIFDY

SEQ ID NO: 9219 - protein, 110 aa, Artificial Sequence; identical to SEQ ID NO: 7219
  Synthetic

SEQ ID NO: 9220 - protein, 10 aa, Artificial Sequence
  Synthetic
SSYTSSSTLV

SEQ ID NO: 9221 - protein, 122 aa, Artificial Sequence; identical to SEQ ID NO: 7213
  Synthetic

SEQ ID NO: 9222 - protein, 15 aa, Artificial Sequence
  Synthetic
ARGEAVAGTTGFFDY

SEQ ID NO: 9223 - protein, 111 aa, Artificial Sequence; identical to SEQ ID NO: 7215
  Synthetic

SEQ ID NO: 9224 - protein, 12 aa, Artificial Sequence
  Synthetic
AAWDDSLSGFVV

SEQ ID NO: 9225 - protein, 117 aa, Artificial Sequence; identical to SEQ ID NO: 7225
  Synthetic

SEQ ID NO: 9226 - protein, 11 aa, Artificial Sequence
  Synthetic
ARGDGELFFDQ

SEQ ID NO: 9227 - protein, 110 aa, Artificial Sequence; identical to SEQ ID NO: 7211
  Synthetic

SEQ ID NO: 9228 - protein, 10 aa, Artificial Sequence
  Synthetic
QSYDSSLYAV

SEQ ID NO: 9229 - protein, 132 aa, Artificial Sequence; identical to SEQ ID NO: 7229
  Synthetic

SEQ ID NO: 9230 - protein, 24 aa, Artificial Sequence
  Synthetic
ARERPGGTYSNTWYTPTDTNWFDT

SEQ ID NO: 9231 - protein, 108 aa, Artificial Sequence; identical to SEQ ID NO: 7231
  Synthetic

SEQ ID NO: 9232 - protein, 11 aa, Artificial Sequence
  Synthetic
QVWDSSRDHVV

SEQ ID NO: 9233 - protein, 127 aa, Artificial Sequence; identical to SEQ ID NO: 7233
  Synthetic

SEQ ID NO: 9234 - protein, 20 aa, Artificial Sequence
  Synthetic
ARANHETTMDTYYYYYYMDV

SEQ ID NO: 9235 - protein, 111 aa, Artificial Sequence; identical to SEQ ID NO: 7235
  Synthetic

SEQ ID NO: 9236 - protein, 11 aa, Artificial Sequence
  Synthetic
SSYTSSSTSVV

SEQ ID NO: 9237 - protein, 125 aa, Artificial Sequence; identical to SEQ ID NO: 7237
  Synthetic

SEQ ID NO: 9238 - protein, 18 aa, Artificial Sequence
  Synthetic
ARYKGTTVNTNYYYGMDV

SEQ ID NO: 9239 - protein, 106 aa, Artificial Sequence; identical to SEQ ID NO: 7239
  Synthetic

SEQ ID NO: 9240 - protein, 9 aa, Artificial Sequence
  Synthetic
QAWDSSTVV

SEQ ID NO: 9241 - protein, 127 aa, Artificial Sequence; identical to SEQ ID NO: 7233
  Synthetic

SEQ ID NO: 9242 - protein, 20 aa, Artificial Sequence
  Synthetic
ARANHETTMDTYYYYYYMDV

SEQ ID NO: 9243 - protein, 111 aa, Artificial Sequence; identical to SEQ ID NO: 7243
  Synthetic

SEQ ID NO: 9244 - protein, 11 aa, Artificial Sequence
  Synthetic
SSYTSSSTSVV

SEQ ID NO: 9245 - protein, 125 aa, Artificial Sequence; identical to SEQ ID NO: 7245
  Synthetic

SEQ ID NO: 9246 - protein, 18 aa, Artificial Sequence
  Synthetic
ARLHPTYYDILTGYYIDY

SEQ ID NO: 9247 - protein, 109 aa, Artificial Sequence; identical to SEQ ID NO: 7247
  Synthetic

SEQ ID NO: 9248 - protein, 9 aa, Artificial Sequence
  Synthetic
CLYAFSSIV

SEQ ID NO: 9249 - protein, 120 aa, Artificial Sequence; identical to SEQ ID NO: 7249
  Synthetic

SEQ ID NO: 9250 - protein, 14 aa, Artificial Sequence
  Synthetic
ARILRGVAENWFDP

SEQ ID NO: 9251 - protein, 109 aa, Artificial Sequence; identical to SEQ ID NO: 7251
  Synthetic

SEQ ID NO: 9252 - protein, 12 aa, Artificial Sequence
  Synthetic
QVWDNNSDHRGV

SEQ ID NO: 9253 - protein, 123 aa, Artificial Sequence; identical to SEQ ID NO: 7253
  Synthetic

SEQ ID NO: 9254 - protein, 16 aa, Artificial Sequence
  Synthetic
ARGGPPGGVKLELTDY

SEQ ID NO: 9255 - protein, 111 aa, Artificial Sequence; identical to SEQ ID NO: 7255
  Synthetic

SEQ ID NO: 9256 - protein, 12 aa, Artificial Sequence
  Synthetic
AAWDDSLNGPVV

SEQ ID NO: 9257 - protein, 126 aa, Artificial Sequence; identical to SEQ ID NO: 7257
  Synthetic

SEQ ID NO: 9258 - protein, 18 aa, Artificial Sequence
  Synthetic
AGMYYDILTGYSEGAFDI

SEQ ID NO: 9259 - protein, 110 aa, Artificial Sequence; identical to SEQ ID NO: 7259
  Synthetic

SEQ ID NO: 9260 - protein, 10 aa, Artificial Sequence
  Synthetic
CSYAGSSTWV

SEQ ID NO: 9261 - protein, 126 aa, Artificial Sequence; identical to SEQ ID NO: 7261
  Synthetic

SEQ ID NO: 9262 - protein, 19 aa, Artificial Sequence
  Synthetic
AKGGYYYYNSDSYQAEIDY

SEQ ID NO: 9263 - protein, 110 aa, Artificial Sequence; identical to SEQ ID NO: 7263
  Synthetic

SEQ ID NO: 9264 - protein, 11 aa, Artificial Sequence
  Synthetic
GTWDSSLSAFV

SEQ ID NO: 9265 - protein, 118 aa, Artificial Sequence; identical to SEQ ID NO: 7265
  Synthetic

SEQ ID NO: 9266 - protein, 11 aa, Artificial Sequence
  Synthetic
ARDFYHNWFDP

SEQ ID NO: 9267 - protein, 112 aa, Artificial Sequence; identical to SEQ ID NO: 7267
  Synthetic

SEQ ID NO: 9268 - protein, 11 aa, Artificial Sequence
  Synthetic
QSYDSSNQWVV

SEQ ID NO: 9269 - protein, 121 aa, Artificial Sequence; identical to SEQ ID NO: 7269
  Synthetic

SEQ ID NO: 9270 - protein, 14 aa, Artificial Sequence
  Synthetic
AKDDREGFGDYFDY

SEQ ID NO: 9271 - protein, 108 aa, Artificial Sequence; identical to SEQ ID NO: 7271
  Synthetic

SEQ ID NO: 9272 - protein, 11 aa, Artificial Sequence
  Synthetic
QVWDSSSDHYV

SEQ ID NO: 9273 - protein, 118 aa, Artificial Sequence; identical to SEQ ID NO: 7273
  Synthetic

SEQ ID NO: 9274 - protein, 12 aa, Artificial Sequence
  Synthetic
ARLQWLRGAFDI

SEQ ID NO: 9275 - protein, 110 aa, Artificial Sequence; identical to SEQ ID NO: 7275
  Synthetic

SEQ ID NO: 9276 - protein, 9 aa, Artificial Sequence
  Synthetic
QSYDSSNLV

SEQ ID NO: 9277 - protein, 118 aa, Artificial Sequence; identical to SEQ ID NO: 7277
  Synthetic

SEQ ID NO: 9278 - protein, 12 aa, Artificial Sequence
  Synthetic
ARATTPFSGVDY

SEQ ID NO: 9279 - protein, 110 aa, Artificial Sequence; identical to SEQ ID NO: 7279
  Synthetic

SEQ ID NO: 9280 - protein, 9 aa, Artificial Sequence
  Synthetic
QSYDTSNWV

SEQ ID NO: 9281 - protein, 124 aa, Artificial Sequence; identical to SEQ ID NO: 7281
  Synthetic

SEQ ID NO: 9282 - protein, 17 aa, Artificial Sequence
  Synthetic
ARDRGLRLGGPKYYFDY

SEQ ID NO: 9283 - protein, 109 aa, Artificial Sequence; identical to SEQ ID NO: 7283
  Synthetic

SEQ ID NO: 9284 - protein, 9 aa, Artificial Sequence
  Synthetic
SSYTSSSVV

SEQ ID NO: 9285 - protein, 128 aa, Artificial Sequence; identical to SEQ ID NO: 7285
  Synthetic

SEQ ID NO: 9286 - protein, 21 aa, Artificial Sequence
  Synthetic
ARETQGGYYGSGSYYASPFDP

SEQ ID NO: 9287 - protein, 109 aa, Artificial Sequence; identical to SEQ ID NO: 7287
  Synthetic

SEQ ID NO: 9288 - protein, 12 aa, Artificial Sequence
  Synthetic
QVWDSSSDHPVV

SEQ ID NO: 9289 - protein, 127 aa, Artificial Sequence; identical to SEQ ID NO: 7289
  Synthetic

SEQ ID NO: 9290 - protein, 21 aa, Artificial Sequence
  Synthetic
ARVEDWGYCSSTNCYSGAFDI

SEQ ID NO: 9291 - protein, 111 aa, Artificial Sequence; identical to SEQ ID NO: 7291
  Synthetic

SEQ ID NO: 9292 - protein, 12 aa, Artificial Sequence
  Synthetic
AAWDDSLNGAWV

SEQ ID NO: 9293 - protein, 126 aa, Artificial Sequence; identical to SEQ ID NO: 7293
  Synthetic

SEQ ID NO: 9294 - protein, 19 aa, Artificial Sequence
  Synthetic
ARDPSPIIARPGMGYWFDP

SEQ ID NO: 9295 - protein, 111 aa, Artificial Sequence; identical to SEQ ID NO: 7295
  Synthetic

SEQ ID NO: 9296 - protein, 11 aa, Artificial Sequence
  Synthetic
QSYDSSLSAVV

SEQ ID NO: 9297 - protein, 127 aa, Artificial Sequence; identical to SEQ ID NO: 7297
  Synthetic

SEQ ID NO: 9298 - protein, 20 aa, Artificial Sequence
  Synthetic
ARDPIWFGELLSPPFVHFDY

SEQ ID NO: 9299 - protein, 113 aa, Artificial Sequence; identical to SEQ ID NO: 7299
  Synthetic

SEQ ID NO: 9300 - protein, 14 aa, Artificial Sequence
  Synthetic
GTWDSSLSAGGVYV

SEQ ID NO: 9301 - protein, 123 aa, Artificial Sequence; identical to SEQ ID NO: 7301
  Synthetic

SEQ ID NO: 9302 - protein, 16 aa, Artificial Sequence
  Synthetic
ARGHDYVWGSYRYHNV

SEQ ID NO: 9303 - protein, 110 aa, Artificial Sequence; identical to SEQ ID NO: 7303
  Synthetic
  misc_feature (109)..(109): Xaa can be any naturally occurring amino acid

SEQ ID NO: 9304 - protein, 10 aa, Artificial Sequence
  Synthetic
SSYTSSSTLL

SEQ ID NO: 9305 - protein, 119 aa, Artificial Sequence; identical to SEQ ID NO: 7305
  Synthetic

SEQ ID NO: 9306 - protein, 12 aa, Artificial Sequence
  Synthetic
AIQLWLRGGYDY

SEQ ID NO: 9307 - protein, 111 aa, Artificial Sequence; identical to SEQ ID NO: 7307
  Synthetic

SEQ ID NO: 9308 - protein, 11 aa, Artificial Sequence
  Synthetic
SSYAGSNNYVV

SEQ ID NO: 9309 - protein, 132 aa, Artificial Sequence; identical to SEQ ID NO: 7309
  Synthetic

SEQ ID NO: 9310 - protein, 25 aa, Artificial Sequence
  Synthetic
TRGSRGYYDRSGYYTPLDPYYGMDV

SEQ ID NO: 9311 - protein, 112 aa, Artificial Sequence; identical to SEQ ID NO: 7311
  Synthetic

SEQ ID NO: 9312 - protein, 12 aa, Artificial Sequence
  Synthetic
QSYDSSLSGSYV

SEQ ID NO: 9313 - protein, 127 aa, Artificial Sequence; identical to SEQ ID NO: 7313
  Synthetic
  misc_feature (58)..(58): Xaa can be any naturally occurring amino acid

SEQ ID NO: 9314 - protein, 20 aa, Artificial Sequence
  Synthetic
ASGYTGYDYFVRGDYYGLDV

SEQ ID NO: 9315 - protein, 111 aa, Artificial Sequence; identical to SEQ ID NO: 7315
  Synthetic

SEQ ID NO: 9316 - protein, 9 aa, Artificial Sequence
  Synthetic
QTWGTGILV

SEQ ID NO: 9317 - protein, 118 aa, Artificial Sequence; identical to SEQ ID NO: 7317
  Synthetic

SEQ ID NO: 9318 - protein, 12 aa, Artificial Sequence
  Synthetic
ARGEGWELPYDY

SEQ ID NO: 9319 - protein, 111 aa, Artificial Sequence; identical to SEQ ID NO: 7319
  Synthetic

SEQ ID NO: 9320 - protein, 11 aa, Artificial Sequence
  Synthetic
SSYEGSNNFVV

SEQ ID NO: 9321 - protein, 124 aa, Artificial Sequence; identical to SEQ ID NO: 7321
  Synthetic

SEQ ID NO: 9322 - protein, 17 aa, Artificial Sequence
  Synthetic
AKDSLVRRNFYYYYMDV

SEQ ID NO: 9323 - protein, 111 aa, Artificial Sequence; identical to SEQ ID NO: 7323
  Synthetic
  misc_feature (110)..(110): Xaa can be any naturally occurring amino acid

SEQ ID NO: 9324 - protein, 11 aa, Artificial Sequence
  Synthetic
QSYDSSLSGVV

SEQ ID NO: 9325 - protein, 118 aa, Artificial Sequence; identical to SEQ ID NO: 7325
  Synthetic

SEQ ID NO: 9326 - protein, 11 aa, Artificial Sequence
  Synthetic
ARGQLLPFADY

SEQ ID NO: 9327 - protein, 111 aa, Artificial Sequence; identical to SEQ ID NO: 7327
  Synthetic

SEQ ID NO: 9328 - protein, 10 aa, Artificial Sequence
  Synthetic
QSYDSSKSWV

SEQ ID NO: 9329 - protein, 120 aa, Artificial Sequence; identical to SEQ ID NO: 7181
  Synthetic

SEQ ID NO: 9330 - protein, 13 aa, Artificial Sequence
  Synthetic
VRDGGRPGDAFDI

SEQ ID NO: 9331 - protein, 110 aa, Artificial Sequence; identical to SEQ ID NO: 7331
  Synthetic

SEQ ID NO: 9332 - protein, 10 aa, Artificial Sequence
  Synthetic
NSYTSSSTRV

SEQ ID NO: 9333 - protein, 122 aa, Artificial Sequence; identical to SEQ ID NO: 7333
  Synthetic

SEQ ID NO: 9334 - protein, 16 aa, Artificial Sequence
  Synthetic
ARYGWGYDSSGYYFDY

SEQ ID NO: 9335 - protein, 110 aa, Artificial Sequence; identical to SEQ ID NO: 7335
  Synthetic

SEQ ID NO: 9336 - protein, 10 aa, Artificial Sequence
  Synthetic
CSYAGSSTWV

SEQ ID NO: 9337 - protein, 127 aa, Artificial Sequence; identical to SEQ ID NO: 7337
  Synthetic

SEQ ID NO: 9338 - protein, 21 aa, Artificial Sequence
  Synthetic
ARVEDWGYCSSTNCYSGAFDI

SEQ ID NO: 9339 - protein, 111 aa, Artificial Sequence; identical to SEQ ID NO: 7339
  Synthetic

SEQ ID NO: 9340 - protein, 12 aa, Artificial Sequence
  Synthetic
AAWDDSLNGAWV

SEQ ID NO: 9341 - protein, 132 aa, Artificial Sequence; identical to SEQ ID NO: 7229
  Synthetic

SEQ ID NO: 9342 - protein, 24 aa, Artificial Sequence
  Synthetic
ARERPGGTYSNTWYTPTDTNWFDT

SEQ ID NO: 9343 - protein, 108 aa, Artificial Sequence; identical to SEQ ID NO: 7231
  Synthetic

SEQ ID NO: 9344 - protein, 11 aa, Artificial Sequence
  Synthetic
QVWDSSRDHVV

SEQ ID NO: 9345 - protein, 127 aa, Artificial Sequence; identical to SEQ ID NO: 7345
  Synthetic

SEQ ID NO: 9346 - protein, 20 aa, Artificial Sequence
  Synthetic
ASGYTGYDYFVGGDYYGMDV

SEQ ID NO: 9347 - protein, 111 aa, Artificial Sequence; identical to SEQ ID NO: 7347
  Synthetic

SEQ ID NO: 9348 - protein, 9 aa, Artificial Sequence
  Synthetic
QTWGTGILV

SEQ ID NO: 9349 - protein, 126 aa, Artificial Sequence; identical to SEQ ID NO: 7349
  Synthetic

SEQ ID NO: 9350 - protein, 19 aa, Artificial Sequence
  Synthetic
ATETNSETTDMFTGYSFDP

SEQ ID NO: 9351 - protein, 110 aa, Artificial Sequence; identical to SEQ ID NO: 7351
  Synthetic

SEQ ID NO: 9352 - protein, 11 aa, Artificial Sequence
  Synthetic
AAWDDSLSGYV

SEQ ID NO: 9353 - protein, 121 aa, Artificial Sequence; identical to SEQ ID NO: 7353
  Synthetic

SEQ ID NO: 9354 - protein, 14 aa, Artificial Sequence
  Synthetic
AREDYYDSSGSFDY

SEQ ID NO: 9355 - protein, 110 aa, Artificial Sequence; identical to SEQ ID NO: 7355
  Synthetic

SEQ ID NO: 9356 - protein, 10 aa, Artificial Sequence
  Synthetic
SSYTSSSTWV

SEQ ID NO: 9357 - protein, 127 aa, Artificial Sequence; identical to SEQ ID NO: 7357
  Synthetic

SEQ ID NO: 9358 - protein, 20 aa, Artificial Sequence
  Synthetic
ARDPIWFGELLSPPFVHFDY

SEQ ID NO: 9359 - protein, 113 aa, Artificial Sequence; identical to SEQ ID NO: 7359
  Synthetic

SEQ ID NO: 9360 - protein, 14 aa, Artificial Sequence
  Synthetic
GAWDSSLSAGGVYV

SEQ ID NO: 9361 - protein, 124 aa, Artificial Sequence; identical to SEQ ID NO: 7361
  Synthetic

SEQ ID NO: 9362 - protein, 17 aa, Artificial Sequence
  Synthetic
AKDPLPFRDFFYYYMDV

SEQ ID NO: 9363 - protein, 111 aa, Artificial Sequence; identical to SEQ ID NO: 7363
  Synthetic

SEQ ID NO: 9364 - protein, 11 aa, Artificial Sequence
  Synthetic
SSYTSSSTLGV

SEQ ID NO: 9365 - protein, 121 aa, Artificial Sequence; identical to SEQ ID NO: 7365
  Synthetic

SEQ ID NO: 9366 - protein, 14 aa, Artificial Sequence
  Synthetic
ATYRSYLPLVQVDY

SEQ ID NO: 9367 - protein, 111 aa, Artificial Sequence; identical to SEQ ID NO: 7367
  Synthetic

SEQ ID NO: 9368 - protein, 10 aa, Artificial Sequence
  Synthetic
QSYDSSKHAV

SEQ ID NO: 9369 - protein, 129 aa, Artificial Sequence; identical to SEQ ID NO: 7369
  Synthetic

SEQ ID NO: 9370 - protein, 22 aa, Artificial Sequence
  Synthetic
ARAPLFPTGVLAGDYYYYGMDV

SEQ ID NO: 9371 - protein, 110 aa, Artificial Sequence; identical to SEQ ID NO: 7371
  Synthetic

SEQ ID NO: 9372 - protein, 10 aa, Artificial Sequence
  Synthetic
CSYAGSSTLV

SEQ ID NO: 9373 - protein, 122 aa, Artificial Sequence; identical to SEQ ID NO: 7373
  Synthetic

SEQ ID NO: 9374 - protein, 15 aa, Artificial Sequence
  Synthetic
ARDLKAVAISGDIDY

SEQ ID NO: 9375 - protein, 110 aa, Artificial Sequence; identical to SEQ ID NO: 7375
  Synthetic

SEQ ID NO: 9376 - protein, 10 aa, Artificial Sequence
  Synthetic
FSYAGSNTWV

SEQ ID NO: 9377 - protein, 120 aa, Artificial Sequence; identical to SEQ ID NO: 7377
  Synthetic

SEQ ID NO: 9378 - protein, 13 aa, Artificial Sequence
  Synthetic
SRRQGSYPPYFDY

SEQ ID NO: 9379 - protein, 108 aa, Artificial Sequence; identical to SEQ ID NO: 7379
  Synthetic

SEQ ID NO: 9380 - protein, 11 aa, Artificial Sequence
  Synthetic
QVWDSNSDYYV

SEQ ID NO: 9381 - protein, 125 aa, Artificial Sequence; identical to SEQ ID NO: 7381
  Synthetic

SEQ ID NO: 9382 - protein, 18 aa, Artificial Sequence
  Synthetic
ARYKGTTVNTNYYYGMDV

SEQ ID NO: 9383 - protein, 106 aa, Artificial Sequence; identical to SEQ ID NO: 7383
  Synthetic

SEQ ID NO: 9384 - protein, 9 aa, Artificial Sequence
  Synthetic
QAWDISTVV

SEQ ID NO: 9385 - protein, 123 aa, Artificial Sequence; identical to SEQ ID NO: 7385
  Synthetic

SEQ ID NO: 9386 - protein, 18 aa, Artificial Sequence
  Synthetic
ARNGMHYGSGSYYNGFDP

SEQ ID NO: 9387 - protein, 110 aa, Artificial Sequence; identical to SEQ ID NO: 7387
  Synthetic

SEQ ID NO: 9388 - protein, 11 aa, Artificial Sequence
  Synthetic
ATWDDSLSGVV

SEQ ID NO: 9389 - protein, 124 aa, Artificial Sequence; identical to SEQ ID NO: 7389
  Synthetic

SEQ ID NO: 9390 - protein, 17 aa, Artificial Sequence
  Synthetic
AKDQGYGDFYYYFGMDV

SEQ ID NO: 9391 - protein, 109 aa, Artificial Sequence; identical to SEQ ID NO: 7391
  Synthetic

SEQ ID NO: 9392 - protein, 9 aa, Artificial Sequence
  Synthetic
SSYTSSSLI

SEQ ID NO: 9393 - protein, 118 aa, Artificial Sequence; identical to SEQ ID NO: 7393
  Synthetic

SEQ ID NO: 9394 - protein, 12 aa, Artificial Sequence
  Synthetic
ARCAWLRGSFDY

SEQ ID NO: 9395 - protein, 111 aa, Artificial Sequence; identical to SEQ ID NO: 7395
  Synthetic

SEQ ID NO: 9396 - protein, 10 aa, Artificial Sequence
  Synthetic
QSYDFSSHYV

SEQ ID NO: 9397 - protein, 128 aa, Artificial Sequence; identical to SEQ ID NO: 7397
  Synthetic

SEQ ID NO: 9398 - protein, 21 aa, Artificial Sequence
  Synthetic
ARDLEYYDFWSGLSGDWSFDL

SEQ ID NO: 9399 - protein, 109 aa, Artificial Sequence; identical to SEQ ID NO: 7399
  Synthetic

SEQ ID NO: 9400 - protein, 9 aa, Artificial Sequence
  Synthetic
QSYDSSLEV

SEQ ID NO: 9401 - protein, 129 aa, Artificial Sequence; identical to SEQ ID NO: 7401
  Synthetic

SEQ ID NO: 9402 - protein, 22 aa, Artificial Sequence
  Synthetic
ARLLHYYDRSGYSGATDDAFDI

SEQ ID NO: 9403 - protein, 112 aa, Artificial Sequence; identical to SEQ ID NO: 7403
  Synthetic

SEQ ID NO: 9404 - protein, 12 aa, Artificial Sequence
  Synthetic
QSYDSSLSGLVL

SEQ ID NO: 9405 - protein, 123 aa, Artificial Sequence; identical to SEQ ID NO: 7405
  Synthetic

SEQ ID NO: 9406 - protein, 16 aa, Artificial Sequence
  Synthetic
AKDGDIVVALNDGFDI

SEQ ID NO: 9407 - protein, 109 aa, Artificial Sequence; identical to SEQ ID NO: 7407
  Synthetic

SEQ ID NO: 9408 - protein, 12 aa, Artificial Sequence
  Synthetic
QVWDGSSDHPVI

SEQ ID NO: 9409 - protein, 117 aa, Artificial Sequence; identical to SEQ ID NO: 7409
  Synthetic

SEQ ID NO: 9410 - protein, 11 aa, Artificial Sequence
  Synthetic
ARGDGELIFDQ

SEQ ID NO: 9411 - protein, 110 aa, Artificial Sequence; identical to SEQ ID NO: 7411
  Synthetic

SEQ ID NO: 9412 - protein, 10 aa, Artificial Sequence
  Synthetic
QSYDSNLYAV

SEQ ID NO: 9413 - protein, 117 aa, Artificial Sequence; identical to SEQ ID NO: 7413
  Synthetic

SEQ ID NO: 9414 - protein, 11 aa, Artificial Sequence
  Synthetic
ARTLGWWELDP

SEQ ID NO: 9415 - protein, 110 aa, Artificial Sequence; identical to SEQ ID NO: 7415
  Synthetic

SEQ ID NO: 9416 - protein, 11 aa, Artificial Sequence
  Synthetic
AAWDDSLNGPV

SEQ ID NO: 9417 - protein, 122 aa, Artificial Sequence; identical to SEQ ID NO: 7417
  Synthetic

SEQ ID NO: 9418 - protein, 14 aa, Artificial Sequence
  Synthetic
ARFDVFIPADAFDI

SEQ ID NO: 9419 - protein, 109 aa, Artificial Sequence; identical to SEQ ID NO: 7419
  Synthetic

SEQ ID NO: 9420 - protein, 10 aa, Artificial Sequence
  Synthetic
CSYAGTYTVV

SEQ ID NO: 9421 - protein, 125 aa, Artificial Sequence; identical to SEQ ID NO: 7421
  Synthetic

SEQ ID NO: 9422 - protein, 17 aa, Artificial Sequence
  Synthetic
ARLIRYCSTTSCYSFDF

SEQ ID NO: 9423 - protein, 110 aa, Artificial Sequence; identical to SEQ ID NO: 7423
  Synthetic

SEQ ID NO: 9424 - protein, 10 aa, Artificial Sequence
  Synthetic
CSYVGSSSVI

SEQ ID NO: 9425 - protein, 122 aa, Artificial Sequence; identical to SEQ ID NO: 7425
  Synthetic

SEQ ID NO: 9426 - protein, 14 aa, Artificial Sequence
  Synthetic
ARAIVVVTLNWFDP

SEQ ID NO: 9427 - protein, 111 aa, Artificial Sequence; identical to SEQ ID NO: 7427
  Synthetic

SEQ ID NO: 9428 - protein, 10 aa, Artificial Sequence
  Synthetic
QSYDSSNPVV

SEQ ID NO: 9429 - protein, 119 aa, Artificial Sequence; identical to SEQ ID NO: 7429
  Synthetic

SEQ ID NO: 9430 - protein, 12 aa, Artificial Sequence
  Synthetic
ASAPWLRGHFDY

SEQ ID NO: 9431 - protein, 111 aa, Artificial Sequence; identical to SEQ ID NO: 7431
  Synthetic

SEQ ID NO: 9432 - protein, 10 aa, Artificial Sequence
  Synthetic
QSFDSNTGRV

SEQ ID NO: 9433 - protein, 127 aa, Artificial Sequence; identical to SEQ ID NO: 7433
  Synthetic

SEQ ID NO: 9434 - protein, 20 aa, Artificial Sequence
  Synthetic
ARAPLYYDILTGYYPGAYDY

SEQ ID NO: 9435 - protein, 110 aa, Artificial Sequence; identical to SEQ ID NO: 1803
  Synthetic

SEQ ID NO: 9436 - protein, 10 aa, Artificial Sequence
  Synthetic
SSYTSSSTVV

SEQ ID NO: 9437 - protein, 116 aa, Artificial Sequence; identical to SEQ ID NO: 7437
  Synthetic

SEQ ID NO: 9438 - skipped

SEQ ID NO: 9439 - protein, 113 aa, Artificial Sequence; identical to SEQ ID NO: 7439
  Synthetic

SEQ ID NO: 9440 - protein, 12 aa, Artificial Sequence
  Synthetic
QSYDGTTRGHVV

SEQ ID NO: 9441 - protein, 120 aa, Artificial Sequence; identical to SEQ ID NO: 7441
  Synthetic

SEQ ID NO: 9442 - protein, 14 aa, Artificial Sequence
  Synthetic
AREVHNEPGDYFDY

SEQ ID NO: 9443 - protein, 108 aa, Artificial Sequence; identical to SEQ ID NO: 7443
  Synthetic

SEQ ID NO: 9444 - protein, 11 aa, Artificial Sequence
  Synthetic
QVWDSSGDHWV

SEQ ID NO: 9445 - protein, 120 aa, Artificial Sequence; identical to SEQ ID NO: 7445
  Synthetic

SEQ ID NO: 9446 - protein, 12 aa, Artificial Sequence
  Synthetic
ARGSRSSYYFDY

SEQ ID NO: 9447 - protein, 110 aa, Artificial Sequence; identical to SEQ ID NO: 7447
  Synthetic

SEQ ID NO: 9448 - protein, 12 aa, Artificial Sequence
  Synthetic
GTWDSSLSVPFV

SEQ ID NO: 9449 - protein, 124 aa, Artificial Sequence; identical to SEQ ID NO: 295
  Synthetic

SEQ ID NO: 9450 - protein, 16 aa, Artificial Sequence
  Synthetic
ARAMITFGGVIVVLDY

SEQ ID NO: 9451 - protein, 111 aa, Artificial Sequence; identical to SEQ ID NO: 7451
  Synthetic

SEQ ID NO: 9452 - protein, 11 aa, Artificial Sequence
  Synthetic
SSYAGSNILYV

SEQ ID NO: 9453 - protein, 130 aa, Artificial Sequence; identical to SEQ ID NO: 7453
  Synthetic

SEQ ID NO: 9454 - protein, 23 aa, Artificial Sequence
  Synthetic
ARDLGVVLPGPADDYFYFYGMDV

SEQ ID NO: 9455 - protein, 108 aa, Artificial Sequence; identical to SEQ ID NO: 7455
  Synthetic

SEQ ID NO: 9456 - protein, 11 aa, Artificial Sequence
  Synthetic
QSADRSGMSRV

SEQ ID NO: 9457 - protein, 120 aa, Artificial Sequence; identical to SEQ ID NO: 7457
  Synthetic

SEQ ID NO: 9458 - protein, 13 aa, Artificial Sequence
  Synthetic
ARDGGRPGDAFDL

SEQ ID NO: 9459 - protein, 109 aa, Artificial Sequence; identical to SEQ ID NO: 7459
  Synthetic

SEQ ID NO: 9460 - protein, 10 aa, Artificial Sequence
  Synthetic
NSYRSNSTRV

SEQ ID NO: 9461 - protein, 120 aa, Artificial Sequence; identical to SEQ ID NO: 7461
  Synthetic

SEQ ID NO: 9462 - protein, 14 aa, Artificial Sequence
  Synthetic
ARVPVGWEPPGFDL

SEQ ID NO: 9463 - protein, 107 aa, Artificial Sequence; identical to SEQ ID NO: 7463
  Synthetic

SEQ ID NO: 9464 - protein, 11 aa, Artificial Sequence
  Synthetic
QVWDSSSDHPV

SEQ ID NO: 9465 - protein, 123 aa, Artificial Sequence; identical to SEQ ID NO: 7465
  Synthetic

SEQ ID NO: 9466 - protein, 16 aa, Artificial Sequence
  Synthetic
AIGALQMATIIDAFDI

SEQ ID NO: 9467 - protein, 110 aa, Artificial Sequence; identical to SEQ ID NO: 7467
  Synthetic

SEQ ID NO: 9468 - protein, 11 aa, Artificial Sequence
  Synthetic
AAWDDSLNGVV

SEQ ID NO: 9469 - protein, 117 aa, Artificial Sequence; identical to SEQ ID NO: 7469
  Synthetic

SEQ ID NO: 9470 - protein, 11 aa, Artificial Sequence
  Synthetic
ARDLAVYGMDV

SEQ ID NO: 9471 - protein, 109 aa, Artificial Sequence; identical to SEQ ID NO: 7471
  Synthetic

SEQ ID NO: 9472 - protein, 10 aa, Artificial Sequence
  Synthetic
QSYDTSLRVL

SEQ ID NO: 9473 - protein, 122 aa, Artificial Sequence; identical to SEQ ID NO: 7473
  Synthetic

SEQ ID NO: 9474 - protein, 15 aa, Artificial Sequence
  Synthetic
ARAMAVAGTSGDFDY

SEQ ID NO: 9475 - protein, 111 aa, Artificial Sequence; identical to SEQ ID NO: 7195
  Synthetic

SEQ ID NO: 9476 - protein, 12 aa, Artificial Sequence
  Synthetic
AAWDDSLNGHVV

SEQ ID NO: 9477 - protein, 124 aa, Artificial Sequence; identical to SEQ ID NO: 7477
  Synthetic

SEQ ID NO: 9478 - protein, 17 aa, Artificial Sequence
  Synthetic
ASRWEQLNGGSWHYFDY

SEQ ID NO: 9479 - protein, 112 aa, Artificial Sequence; identical to SEQ ID NO: 7479
  Synthetic

SEQ ID NO: 9480 - protein, 12 aa, Artificial Sequence
  Synthetic
CSYAGSSTFEGV

SEQ ID NO: 9481 - protein, 123 aa, Artificial Sequence; identical to SEQ ID NO: 7481
  Synthetic

SEQ ID NO: 9482 - protein, 16 aa, Artificial Sequence
  Synthetic
ARGGPPGGVKLELTDF

SEQ ID NO: 9483 - protein, 111 aa, Artificial Sequence; identical to SEQ ID NO: 7483
  Synthetic

SEQ ID NO: 9484 - protein, 12 aa, Artificial Sequence
  Synthetic
AAWDDSLDGPVV

SEQ ID NO: 9485 - protein, 123 aa, Artificial Sequence; identical to SEQ ID NO: 7485
  Synthetic

SEQ ID NO: 9486 - protein, 16 aa, Artificial Sequence
  Synthetic
ARSNDIVAASTFYFHF

SEQ ID NO: 9487 - protein, 107 aa, Artificial Sequence; identical to SEQ ID NO: 7487
  Synthetic

SEQ ID NO: 9488 - protein, 10 aa, Artificial Sequence
  Synthetic
QVWYSSSDGV

SEQ ID NO: 9489 - protein, 120 aa, Artificial Sequence; identical to SEQ ID NO: 7489
  Synthetic

SEQ ID NO: 9490 - protein, 14 aa, Artificial Sequence
  Synthetic
ARELTHDVTPYFDY

SEQ ID NO: 9491 - protein, 112 aa, Artificial Sequence; identical to SEQ ID NO: 7491
  Synthetic

SEQ ID NO: 9492 - protein, 12 aa, Artificial Sequence
  Synthetic
QSYDSSLSGWGV

SEQ ID NO: 9493 - protein, 119 aa, Artificial Sequence; identical to SEQ ID NO: 7493
  Synthetic

SEQ ID NO: 9494 - protein, 12 aa, Artificial Sequence
  Synthetic
ARHWGRFGEGDY

SEQ ID NO: 9495 - protein, 112 aa, Artificial Sequence; identical to SEQ ID NO: 7495
  Synthetic

SEQ ID NO: 9496 - protein, 12 aa, Artificial Sequence
  Synthetic
QSYDSSLVPSWV

SEQ ID NO: 9497 - protein, 120 aa, Artificial Sequence; identical to SEQ ID NO: 7497
  Synthetic

SEQ ID NO: 9498 - protein, 12 aa, Artificial Sequence
  Synthetic
ATGSKSSYYFDY

SEQ ID NO: 9499 - protein, 111 aa, Artificial Sequence; identical to SEQ ID NO: 7499
  Synthetic

SEQ ID NO: 9500 - protein, 12 aa, Artificial Sequence
  Synthetic
GTWDSSLSVPYV

SEQ ID NO: 9501 - protein, 117 aa, Artificial Sequence; identical to SEQ ID NO: 321
  Synthetic

SEQ ID NO: 9502 - protein, 11 aa, Artificial Sequence
  Synthetic
AKPVDAAMFDF

SEQ ID NO: 9503 - protein, 109 aa, Artificial Sequence; identical to SEQ ID NO: 7503
  Synthetic

SEQ ID NO: 9504 - protein, 12 aa, Artificial Sequence
  Synthetic
QVWDRSTNHLVV

SEQ ID NO: 9505 - protein, 118 aa, Artificial Sequence; identical to SEQ ID NO: 7505
  Synthetic

SEQ ID NO: 9506 - protein, 11 aa, Artificial Sequence
  Synthetic
ARRGSAWEIDY

SEQ ID NO: 9507 - protein, 110 aa, Artificial Sequence; identical to SEQ ID NO: 7507
  Synthetic

SEQ ID NO: 9508 - protein, 11 aa, Artificial Sequence
  Synthetic
AAWDDSLNGYV

SEQ ID NO: 9509 - protein, 122 aa, Artificial Sequence; identical to SEQ ID NO: 285
  Synthetic

SEQ ID NO: 9510 - protein, 15 aa, Artificial Sequence
  Synthetic
ARGRANWNSNFLLDS

SEQ ID NO: 9511 - protein, 111 aa, Artificial Sequence; identical to SEQ ID NO: 7511
  Synthetic

SEQ ID NO: 9512 - protein, 11 aa, Artificial Sequence
  Synthetic
CSYAGSSTRYV

SEQ ID NO: 9513 - protein, 122 aa, Artificial Sequence; identical to SEQ ID NO: 7513
  Synthetic

SEQ ID NO: 9514 - protein, 15 aa, Artificial Sequence
  Synthetic
ARDLAFSMVRGVFDH

SEQ ID NO: 9515 - protein, 110 aa, Artificial Sequence; identical to SEQ ID NO: 7515
  Synthetic

SEQ ID NO: 9516 - protein, 10 aa, Artificial Sequence
  Synthetic
CSYAGSNSWV

SEQ ID NO: 9517 - protein, 125 aa, Artificial Sequence; identical to SEQ ID NO: 7517
  Synthetic

SEQ ID NO: 9518 - protein, 18 aa, Artificial Sequence
  Synthetic
VRNIGGYGFGGGYNWFDP

SEQ ID NO: 9519 - protein, 110 aa, Artificial Sequence; identical to SEQ ID NO: 7519
  Synthetic

SEQ ID NO: 9520 - protein, 11 aa, Artificial Sequence
  Synthetic
GTWDRSLSAYV

SEQ ID NO: 9521 - protein, 122 aa, Artificial Sequence; identical to SEQ ID NO: 7521
  Synthetic

SEQ ID NO: 9522 - protein, 14 aa, Artificial Sequence
  Synthetic
ARLHQPPEGDWFDP

SEQ ID NO: 9523 - protein, 110 aa, Artificial Sequence; identical to SEQ ID NO: 7523
  Synthetic

SEQ ID NO: 9524 - protein, 13 aa, Artificial Sequence
  Synthetic
QVWDSTSDRPLYV

SEQ ID NO: 9525 - protein, 119 aa, Artificial Sequence; identical to SEQ ID NO: 7525
  Synthetic

SEQ ID NO: 9526 - protein, 12 aa, Artificial Sequence
  Synthetic
ATRGSGNLIFDY

SEQ ID NO: 9527 - protein, 111 aa, Artificial Sequence; identical to SEQ ID NO: 7527
  Synthetic

SEQ ID NO: 9528 - protein, 11 aa, Artificial Sequence
  Synthetic
CSYAGSTTLWV

SEQ ID NO: 9529 - protein, 127 aa, Artificial Sequence; identical to SEQ ID NO: 7529
  Synthetic

SEQ ID NO: 9530 - protein, 19 aa, Artificial Sequence
  Synthetic
ARGLYYYDSGGYLGGDFDS

SEQ ID NO: 9531 - protein, 116 aa, Artificial Sequence; identical to SEQ ID NO: 7531
  Synthetic

SEQ ID NO: 9532 - protein, 13 aa, Artificial Sequence
  Synthetic
GADHGSGSNFVVV

SEQ ID NO: 9533 - protein, 126 aa, Artificial Sequence; identical to SEQ ID NO: 7533
  Synthetic

SEQ ID NO: 9534 - protein, 19 aa, Artificial Sequence
  Synthetic
AKIPSASYDFGSGHDVFDI

SEQ ID NO: 9535 - protein, 110 aa, Artificial Sequence; identical to SEQ ID NO: 7535
  Synthetic

SEQ ID NO: 9536 - protein, 11 aa, Artificial Sequence
  Synthetic
AAWYDSLSGVV

SEQ ID NO: 9537 - protein, 124 aa, Artificial Sequence; identical to SEQ ID NO: 7537
  Synthetic

SEQ ID NO: 9538 - protein, 17 aa, Artificial Sequence
  Synthetic
AKDPLPFRDYYYYYMDV

SEQ ID NO: 9539 - protein, 111 aa, Artificial Sequence; identical to SEQ ID NO: 7539
  Synthetic

SEQ ID NO: 9540 - protein, 11 aa, Artificial Sequence
  Synthetic
SSYTSSSTLGV

SEQ ID NO: 9541 - protein, 128 aa, Artificial Sequence; identical to SEQ ID NO: 7541
  Synthetic

SEQ ID NO: 9542 - protein, 20 aa, Artificial Sequence
  Synthetic
ASLIRAHTFGGVIVNPYFDY

SEQ ID NO: 9543 - protein, 110 aa, Artificial Sequence; identical to SEQ ID NO: 7543
  Synthetic

SEQ ID NO: 9544 - protein, 11 aa, Artificial Sequence
  Synthetic
AAWDDSLSGVL

SEQ ID NO: 9545 - protein, 121 aa, Artificial Sequence; identical to SEQ ID NO: 7545
  Synthetic

SEQ ID NO: 9546 - protein, 14 aa, Artificial Sequence
  Synthetic
AREAPGVVPKLFDS

SEQ ID NO: 9547 - protein, 108 aa, Artificial Sequence; identical to SEQ ID NO: 7547
  Synthetic

SEQ ID NO: 9548 - protein, 11 aa, Artificial Sequence
  Synthetic
QVWDSSADHPV

SEQ ID NO: 9549 - protein, 125 aa, Artificial Sequence; identical to SEQ ID NO: 329
  Synthetic

SEQ ID NO: 9550 - protein, 18 aa, Artificial Sequence
  Synthetic
AKVVVRGVIISLYYGMDV

SEQ ID NO: 9551 - protein, 106 aa, Artificial Sequence; identical to SEQ ID NO: 7551
  Synthetic

SEQ ID NO: 9552 - protein, 9 aa, Artificial Sequence
  Synthetic
QAWDSSTAV

SEQ ID NO: 9553 - protein, 120 aa, Artificial Sequence; identical to SEQ ID NO: 7553
  Synthetic

SEQ ID NO: 9554 - protein, 13 aa, Artificial Sequence
  Synthetic
ARLSSVTMGWFDP

SEQ ID NO: 9555 - protein, 110 aa, Artificial Sequence; identical to SEQ ID NO: 7555
  Synthetic

SEQ ID NO: 9556 - protein, 11 aa, Artificial Sequence
  Synthetic
AAWDDSLDGVV

SEQ ID NO: 9557 - protein, 121 aa, Artificial Sequence; identical to SEQ ID NO: 7557
  Synthetic

SEQ ID NO: 9558 - protein, 14 aa, Artificial Sequence
  Synthetic
AKHPDGYISGWYLF

SEQ ID NO: 9559 - protein, 107 aa, Artificial Sequence; identical to SEQ ID NO: 7559
  Synthetic

SEQ ID NO: 9560 - protein, 11 aa, Artificial Sequence
  Synthetic
QVWDASSDPMV

SEQ ID NO: 9561 - protein, 126 aa, Artificial Sequence; identical to SEQ ID NO: 7561
  Synthetic
  misc_feature (31)..(31): Xaa can be any naturally occurring amino acid
  misc_feature (37)..(37): Xaa can be any naturally occurring amino acid
  misc_feature (39)..(39): Xaa can be any naturally occurring amino acid
  misc_feature (62)..(62): Xaa can be any naturally occurring amino acid
  misc_feature (66)..(66): Xaa can be any naturally occurring amino acid
  misc_feature (70)..(70): Xaa can be any naturally occurring amino acid

SEQ ID NO: 9562 - protein, 19 aa, Artificial Sequence
  Synthetic
ARDPAGYSYGQYYYYYMDV

SEQ ID NO: 9563 - protein, 111 aa, Artificial Sequence; identical to SEQ ID NO: 7563
  Synthetic

SEQ ID NO: 9564 - protein, 11 aa, Artificial Sequence
  Synthetic
SSYTRSSPLYV

SEQ ID NO: 9565 - protein, 124 aa, Artificial Sequence; identical to SEQ ID NO: 7565
  Synthetic

SEQ ID NO: 9566 - protein, 17 aa, Artificial Sequence
  Synthetic
AKDLGYDFRTSYNYYDY

SEQ ID NO: 9567 - protein, 110 aa, Artificial Sequence; identical to SEQ ID NO: 7567
  Synthetic

SEQ ID NO: 9568 - protein, 10 aa, Artificial Sequence
  Synthetic
QSYDSSLSQV

SEQ ID NO: 9569 - protein, 123 aa, Artificial Sequence; identical to SEQ ID NO: 7569
  Synthetic

SEQ ID NO: 9570 - protein, 17 aa, Artificial Sequence
  Synthetic
ARDDSTGYPNPNDAFDI

SEQ ID NO: 9571 - protein, 111 aa, Artificial Sequence; identical to SEQ ID NO: 7571
  Synthetic

SEQ ID NO: 9572 - protein, 12 aa, Artificial Sequence
  Synthetic
GTWDSSLSVGWV

SEQ ID NO: 9573 - protein, 121 aa, Artificial Sequence; identical to SEQ ID NO: 7573
  Synthetic

SEQ ID NO: 9574 - protein, 14 aa, Artificial Sequence
  Synthetic
ARAIVVVTLNWFDL

SEQ ID NO: 9575 - protein, 110 aa, Artificial Sequence; identical to SEQ ID NO: 7575
  Synthetic

SEQ ID NO: 9576 - protein, 10 aa, Artificial Sequence
  Synthetic
QSYDTSNPVI

SEQ ID NO: 9577 - protein, 123 aa, Artificial Sequence; identical to SEQ ID NO: 7577
  Synthetic
  misc_feature (28)..(29): Xaa can be any naturally occurring amino acid
  misc_feature (34)..(34): Xaa can be any naturally occurring amino acid
  misc_feature (48)..(48): Xaa can be any naturally occurring amino acid

SEQ ID NO: 9578 - protein, 17 aa, Artificial Sequence
  Synthetic
ARDRRQGGTYYADAFDI

SEQ ID NO: 9579 - protein, 110 aa, Artificial Sequence; identical to SEQ ID NO: 7579
  Synthetic

SEQ ID NO: 9580 - protein, 13 aa, Artificial Sequence
  Synthetic
QVWGGTNDHGGVL

SEQ ID NO: 9581 - protein, 128 aa, Artificial Sequence; identical to SEQ ID NO: 7581
  Synthetic

SEQ ID NO: 9582 - protein, 21 aa, Artificial Sequence
  Synthetic
ARDLTLVATIGPYYYYYGMDV

SEQ ID NO: 9583 - protein, 111 aa, Artificial Sequence; identical to SEQ ID NO: 7583
  Synthetic

SEQ ID NO: 9584 - protein, 12 aa, Artificial Sequence
  Synthetic
AAWDDSLNGYAV

SEQ ID NO: 9585 - protein, 124 aa, Artificial Sequence; identical to SEQ ID NO: 7585
  Synthetic

SEQ ID NO: 9586 - protein, 17 aa, Artificial Sequence
  Synthetic
AKEESYSSSWIPYGMDV

SEQ ID NO: 9587 - protein, 104 aa, Artificial Sequence; identical to SEQ ID NO: 7587
  Synthetic

SEQ ID NO: 9588 - protein, 8 aa, Artificial Sequence
  Synthetic
QVWDTTPE

SEQ ID NO: 9589 - protein, 122 aa, Artificial Sequence; identical to SEQ ID NO: 7589
  Synthetic

SEQ ID NO: 9590 - protein, 15 aa, Artificial Sequence
  Synthetic
ARDSSSYPVMYYFDY

SEQ ID NO: 9591 - protein, 109 aa, Artificial Sequence; identical to SEQ ID NO: 7591
  Synthetic

SEQ ID NO: 9592 - protein, 12 aa, Artificial Sequence
  Synthetic
QVWDSSSDHFVV

SEQ ID NO: 9593 - protein, 121 aa, Artificial Sequence; identical to SEQ ID NO: 7593
  Synthetic

SEQ ID NO: 9594 - protein, 14 aa, Artificial Sequence
  Synthetic
ARGAVVATWDYFDY

SEQ ID NO: 9595 - protein, 110 aa, Artificial Sequence; identical to SEQ ID NO: 7595
  Synthetic

SEQ ID NO: 9596 - protein, 13 aa, Artificial Sequence
  Synthetic
QVWDGTSDHPGVV

SEQ ID NO: 9597 - protein, 119 aa, Artificial Sequence; identical to SEQ ID NO: 7597
  Synthetic

SEQ ID NO: 9598 - protein, 12 aa, Artificial Sequence
  Synthetic
ARVTYYYGAFDV

SEQ ID NO: 9599 - protein, 110 aa, Artificial Sequence; identical to SEQ ID NO: 7599
  Synthetic

SEQ ID NO: 9600 - protein, 9 aa, Artificial Sequence
  Synthetic
QSYDGSTHV

SEQ ID NO: 9601 - protein, 128 aa, Artificial Sequence; identical to SEQ ID NO: 7601
  Synthetic

SEQ ID NO: 9602 - protein, 21 aa, Artificial Sequence
  Synthetic
VKDIGRGNYALWSGSDWGFDY

SEQ ID NO: 9603 - protein, 109 aa, Artificial Sequence; identical to SEQ ID NO: 7603
  Synthetic

SEQ ID NO: 9604 - protein, 9 aa, Artificial Sequence
  Synthetic
SSYAGTNGV

SEQ ID NO: 9605 - protein, 124 aa, Artificial Sequence; identical to SEQ ID NO: 297
  Synthetic

SEQ ID NO: 9606 - protein, 16 aa, Artificial Sequence
  Synthetic
ARAMITFGGVIVLYDY

SEQ ID NO: 9607 - protein, 111 aa, Artificial Sequence; identical to SEQ ID NO: 7607
  Synthetic

SEQ ID NO: 9608 - protein, 11 aa, Artificial Sequence
  Synthetic
SSYAGSILLYV

SEQ ID NO: 9609 - protein, 125 aa, Artificial Sequence; identical to SEQ ID NO: 335
  Synthetic

SEQ ID NO: 9610 - protein, 18 aa, Artificial Sequence
  Synthetic
ARDVIITMGRGVVFRMDV

SEQ ID NO: 9611 - protein, 110 aa, Artificial Sequence; identical to SEQ ID NO: 336
  Synthetic

SEQ ID NO: 9612 - protein, 11 aa, Artificial Sequence
  Synthetic
AAWDDSLNGVV

SEQ ID NO: 9613 - protein, 123 aa, Artificial Sequence; identical to SEQ ID NO: 7613
  Synthetic

SEQ ID NO: 9614 - protein, 16 aa, Artificial Sequence
  Synthetic
ARGGPPGGVKLELTDY

SEQ ID NO: 9615 - protein, 111 aa, Artificial Sequence; identical to SEQ ID NO: 284
  Synthetic

SEQ ID NO: 9616 - protein, 12 aa, Artificial Sequence
  Synthetic
ASWDDSLNGPVV

SEQ ID NO: 9617 - protein, 132 aa, Artificial Sequence; identical to SEQ ID NO: 7617
  Synthetic

SEQ ID NO: 9618 - protein, 26 aa, Artificial Sequence
  Synthetic
ARVSSPAYYDVLTGYDTSSHYYGMDV

SEQ ID NO: 9619 - protein, 110 aa, Artificial Sequence; identical to SEQ ID NO: 7619
  Synthetic

SEQ ID NO: 9620 - protein, 11 aa, Artificial Sequence
  Synthetic
QSYDSSLRGSV

SEQ ID NO: 9621 - protein, 131 aa, Artificial Sequence; identical to SEQ ID NO: 7621
  Synthetic

SEQ ID NO: 9622 - protein, 24 aa, Artificial Sequence
  Synthetic
SRDPLVTYYYGSGAYYPFQYTDDY

SEQ ID NO: 9623 - protein, 109 aa, Artificial Sequence; identical to SEQ ID NO: 7623
  Synthetic

SEQ ID NO: 9624 - protein, 9 aa, Artificial Sequence
  Synthetic
SSYAGRNWV

SEQ ID NO: 9625 - protein, 124 aa, Artificial Sequence; identical to SEQ ID NO: 7625
  Synthetic

SEQ ID NO: 9626 - protein, 17 aa, Artificial Sequence
  Synthetic
ARDNREYQLLSDYYFDF

SEQ ID NO: 9627 - protein, 106 aa, Artificial Sequence; identical to SEQ ID NO: 7627
  Synthetic

SEQ ID NO: 9628 - protein, 9 aa, Artificial Sequence
  Synthetic
QSADSSGTV

SEQ ID NO: 9629 - protein, 122 aa, Artificial Sequence; identical to SEQ ID NO: 287
  Synthetic

SEQ ID NO: 9630 - protein, 15 aa, Artificial Sequence
  Synthetic
ARGRANYNSKFLLDN

SEQ ID NO: 9631 - protein, 111 aa, Artificial Sequence; identical to SEQ ID NO: 7631
  Synthetic

SEQ ID NO: 9632 - protein, 11 aa, Artificial Sequence
  Synthetic
CSFAGSTTRYV

SEQ ID NO: 9633 - protein, 120 aa, Artificial Sequence; identical to SEQ ID NO: 7633
  Synthetic

SEQ ID NO: 9634 - protein, 13 aa, Artificial Sequence
  Synthetic
TKREGSYPPYFHD

SEQ ID NO: 9635 - protein, 108 aa, Artificial Sequence; identical to SEQ ID NO: 7635
  Synthetic

SEQ ID NO: 9636 - protein, 11 aa, Artificial Sequence
  Synthetic
QVWDSNSDHYV

SEQ ID NO: 9637 - protein, 125 aa, Artificial Sequence; identical to SEQ ID NO: 7637
  Synthetic

SEQ ID NO: 9638 - protein, 18 aa, Artificial Sequence
  Synthetic
ARGRFRVVLVIIYDAFDI

SEQ ID NO: 9639 - protein, 111 aa, Artificial Sequence; identical to SEQ ID NO: 7639
  Synthetic

SEQ ID NO: 9640 - protein, 12 aa, Artificial Sequence
  Synthetic
CSIAGHNNPGYV

SEQ ID NO: 9641 - protein, 122 aa, Artificial Sequence; identical to SEQ ID NO: 7641
  Synthetic

SEQ ID NO: 9642 - protein, 15 aa, Artificial Sequence
  Synthetic
ARGRANYNSKFLLDS

SEQ ID NO: 9643 - protein, 110 aa, Artificial Sequence; identical to SEQ ID NO: 7643
  Synthetic

SEQ ID NO: 9644 - protein, 11 aa, Artificial Sequence
  Synthetic
CSYAGSSSRYV

SEQ ID NO: 9645 - protein, 124 aa, Artificial Sequence; identical to SEQ ID NO: 7645
  Synthetic

SEQ ID NO: 9646 - protein, 17 aa, Artificial Sequence
  Synthetic
ARNRGYSDYGSVYYFDY

SEQ ID NO: 9647 - protein, 110 aa, Artificial Sequence; identical to SEQ ID NO: 350
  Synthetic

SEQ ID NO: 9648 - protein, 11 aa, Artificial Sequence
  Synthetic
QSYDSSLSGSV

SEQ ID NO: 9649 - protein, 124 aa, Artificial Sequence; identical to SEQ ID NO: 7649
  Synthetic

SEQ ID NO: 9650 - protein, 16 aa, Artificial Sequence
  Synthetic
ARFCLSGSHYLFAFDI

SEQ ID NO: 9651 - protein, 109 aa, Artificial Sequence; identical to SEQ ID NO: 7651
  Synthetic

SEQ ID NO: 9652 - protein, 9 aa, Artificial Sequence
  Synthetic
SSYTNSSTF

SEQ ID NO: 9653 - protein, 118 aa, Artificial Sequence; identical to SEQ ID NO: 323
  Synthetic

SEQ ID NO: 9654 - protein, 11 aa, Artificial Sequence
  Synthetic
AKPVDTAMFDS

SEQ ID NO: 9655 - protein, 109 aa, Artificial Sequence; identical to SEQ ID NO: 7655
  Synthetic

SEQ ID NO: 9656 - protein, 12 aa, Artificial Sequence
  Synthetic
QVWDGGNDHLVI

SEQ ID NO: 9657 - protein, 125 aa, Artificial Sequence; identical to SEQ ID NO: 7657
  Synthetic

SEQ ID NO: 9658 - protein, 18 aa, Artificial Sequence
  Synthetic
ARLHPTFYDILTGYYIDY

SEQ ID NO: 9659 - protein, 109 aa, Artificial Sequence; identical to SEQ ID NO: 7659
  Synthetic

SEQ ID NO: 9660 - protein, 9 aa, Artificial Sequence
  Synthetic
CSYAFNSIL

SEQ ID NO: 9661 - protein, 123 aa, Artificial Sequence; identical to SEQ ID NO: 7661
  Synthetic

SEQ ID NO: 9662 - protein, 16 aa, Artificial Sequence
  Synthetic
ARSSRFLPPLPDAFDL

SEQ ID NO: 9663 - protein, 108 aa, Artificial Sequence; identical to SEQ ID NO: 362
  Synthetic

SEQ ID NO: 9664 - protein, 10 aa, Artificial Sequence
  Synthetic
QSYDTRLSVV

SEQ ID NO: 9665 - protein, 120 aa, Artificial Sequence; identical to SEQ ID NO: 367
  Synthetic

SEQ ID NO: 9666 - protein, 13 aa, Artificial Sequence
  Synthetic
ARDGGRPGDPFDI

SEQ ID NO: 9667 - protein, 109 aa, Artificial Sequence; identical to SEQ ID NO: 7667
  Synthetic

SEQ ID NO: 9668 - protein, 10 aa, Artificial Sequence
  Synthetic
NSFTSNSTRV

SEQ ID NO: 9669 - protein, 126 aa, Artificial Sequence; identical to SEQ ID NO: 7669
  Synthetic

SEQ ID NO: 9670 - protein, 18 aa, Artificial Sequence
  Synthetic
ARHESPPWFGSSNEYFQH

SEQ ID NO: 9671 - protein, 109 aa, Artificial Sequence; identical to SEQ ID NO: 7671
  Synthetic

SEQ ID NO: 9672 - protein, 12 aa, Artificial Sequence
  Synthetic
QVWDSSSSPLWV

SEQ ID NO: 9673 - protein, 123 aa, Artificial Sequence; identical to SEQ ID NO: 7673
  Synthetic

SEQ ID NO: 9674 - protein, 15 aa, Artificial Sequence
  Synthetic
ARERVGWELLAYFDS

SEQ ID NO: 9675 - protein, 111 aa, Artificial Sequence; identical to SEQ ID NO: 7675
  Synthetic

SEQ ID NO: 9676 - protein, 12 aa, Artificial Sequence
  Synthetic
AAWDDRLNGHVV

SEQ ID NO: 9677 - protein, 122 aa, Artificial Sequence; identical to SEQ ID NO: 277
  Synthetic

SEQ ID NO: 9678 - protein, 14 aa, Artificial Sequence
  Synthetic
ARATVVITLHWFDP

SEQ ID NO: 9679 - protein, 111 aa, Artificial Sequence; identical to SEQ ID NO: 278
  Synthetic

SEQ ID NO: 9680 - protein, 10 aa, Artificial Sequence
  Synthetic
QSYDVGNPVI

SEQ ID NO: 9681 - protein, 120 aa, Artificial Sequence; identical to SEQ ID NO: 7681
  Synthetic

SEQ ID NO: 9682 - protein, 13 aa, Artificial Sequence
  Synthetic
ARDGGRPGDPFDI

SEQ ID NO: 9683 - protein, 110 aa, Artificial Sequence; identical to SEQ ID NO: 7683
  Synthetic

SEQ ID NO: 9684 - protein, 10 aa, Artificial Sequence
  Synthetic
NSYTSSSTRV

SEQ ID NO: 9685 - protein, 125 aa, Artificial Sequence; identical to SEQ ID NO: 7685
  Synthetic

SEQ ID NO: 9686 - protein, 18 aa, Artificial Sequence
  Synthetic
AKDSGYYYGSGSYSHFDY

SEQ ID NO: 9687 - protein, 111 aa, Artificial Sequence; identical to SEQ ID NO: 7687
  Synthetic

SEQ ID NO: 9688 - protein, 11 aa, Artificial Sequence
  Synthetic
QSYDSSLSGWV

SEQ ID NO: 9689 - protein, 122 aa, Artificial Sequence; identical to SEQ ID NO: 7689
  Synthetic

SEQ ID NO: 9690 - protein, 14 aa, Artificial Sequence
  Synthetic
ARATVVITLHWFGP

SEQ ID NO: 9691 - protein, 111 aa, Artificial Sequence; identical to SEQ ID NO: 7691
  Synthetic

SEQ ID NO: 9692 - protein, 10 aa, Artificial Sequence
  Synthetic
QSYDASNPVI

SEQ ID NO: 9693 - protein, 122 aa, Artificial Sequence; identical to SEQ ID NO: 353
  Synthetic

SEQ ID NO: 9694 - protein, 15 aa, Artificial Sequence
  Synthetic
AKDIGGGSSPPFFDY

SEQ ID NO: 9695 - protein, 108 aa, Artificial Sequence; identical to SEQ ID NO: 7695
  Synthetic

SEQ ID NO: 9696 - protein, 11 aa, Artificial Sequence
  Synthetic
QVWDSSSDHVM

SEQ ID NO: 9697 - protein, 117 aa, Artificial Sequence; identical to SEQ ID NO: 7697
  Synthetic

SEQ ID NO: 9698 - protein, 11 aa, Artificial Sequence
  Synthetic
ARDWGEYYFDY

SEQ ID NO: 9699 - protein, 111 aa, Artificial Sequence; identical to SEQ ID NO: 7699
  Synthetic

SEQ ID NO: 9700 - protein, 11 aa, Artificial Sequence
  Synthetic
SSHTTSGALRV

SEQ ID NO: 9701 - protein, 122 aa, Artificial Sequence; identical to SEQ ID NO: 365
  Synthetic

SEQ ID NO: 9702 - protein, 14 aa, Artificial Sequence
  Synthetic
ARVVRVLPAASVDC

SEQ ID NO: 9703 - protein, 109 aa, Artificial Sequence; identical to SEQ ID NO: 7703
  Synthetic

SEQ ID NO: 9704 - protein, 9 aa, Artificial Sequence
  Synthetic
CSYAGTSVM

SEQ ID NO: 9705 - protein, 125 aa, Artificial Sequence; identical to SEQ ID NO: 7705
  Synthetic

SEQ ID NO: 9706 - protein, 18 aa, Artificial Sequence
  Synthetic
ARDGESSKSYWTPYYFDL

SEQ ID NO: 9707 - protein, 104 aa, Artificial Sequence; identical to SEQ ID NO: 7707
  Synthetic

SEQ ID NO: 9708 - protein, 8 aa, Artificial Sequence
  Synthetic
QVWDVHPV

SEQ ID NO: 9709 - protein, 122 aa, Artificial Sequence; identical to SEQ ID NO: 7709
  Synthetic

SEQ ID NO: 9710 - protein, 15 aa, Artificial Sequence
  Synthetic
ARASWGYGSGSFLDY

SEQ ID NO: 9711 - protein, 111 aa, Artificial Sequence; identical to SEQ ID NO: 7711
  Synthetic

SEQ ID NO: 9712 - protein, 12 aa, Artificial Sequence
  Synthetic
AAWDDSLNGRRV

SEQ ID NO: 9713 - protein, 128 aa, Artificial Sequence; identical to SEQ ID NO: 7713
  Synthetic

SEQ ID NO: 9714 - protein, 21 aa, Artificial Sequence
  Synthetic
ARDRHYYDSSGYRRTDYYMDV

SEQ ID NO: 9715 - protein, 110 aa, Artificial Sequence; identical to SEQ ID NO: 7715
  Synthetic

SEQ ID NO: 9716 - protein, 11 aa, Artificial Sequence
  Synthetic
GTWDSSLGLWV

SEQ ID NO: 9717 - protein, 125 aa, Artificial Sequence; identical to SEQ ID NO: 331
  Synthetic

SEQ ID NO: 9718 - protein, 18 aa, Artificial Sequence
  Synthetic
AKVALRGVFISLYYGMDV

SEQ ID NO: 9719 - protein, 105 aa, Artificial Sequence; identical to SEQ ID NO: 7719
  Synthetic

SEQ ID NO: 9720 - protein, 9 aa, Artificial Sequence
  Synthetic
QTWDSSAVV

SEQ ID NO: 9721 - protein, 121 aa, Artificial Sequence; identical to SEQ ID NO: 7721
  Synthetic

SEQ ID NO: 9722 - protein, 14 aa, Artificial Sequence
  Synthetic
TRMVVVITFAHFDF

SEQ ID NO: 9723 - protein, 112 aa, Artificial Sequence; identical to SEQ ID NO: 7723
  Synthetic

SEQ ID NO: 9724 - protein, 11 aa, Artificial Sequence
  Synthetic
QSYDSSTRSWV

SEQ ID NO: 9725 - protein, 123 aa, Artificial Sequence; identical to SEQ ID NO: 7725
  Synthetic

SEQ ID NO: 9726 - protein, 15 aa, Artificial Sequence
  Synthetic
ARDVLYYDSSGSFDP

SEQ ID NO: 9727 - protein, 112 aa, Artificial Sequence; identical to SEQ ID NO: 7727
  Synthetic

SEQ ID NO: 9728 - protein, 9 aa, Artificial Sequence
  Synthetic
MQALQTPQT

SEQ ID NO: 9729 - protein, 127 aa, Artificial Sequence; identical to SEQ ID NO: 7729
  Synthetic

SEQ ID NO: 9730 - protein, 20 aa, Artificial Sequence
  Synthetic
ARGERYYYDSSGFYITYFDP

SEQ ID NO: 9731 - protein, 107 aa, Artificial Sequence; identical to SEQ ID NO: 7731
  Synthetic

SEQ ID NO: 9732 - protein, 9 aa, Artificial Sequence
  Synthetic
QQSYSTPYT

SEQ ID NO: 9733 - protein, 123 aa, Artificial Sequence; identical to SEQ ID NO: 7733
  Synthetic

SEQ ID NO: 9734 - protein, 16 aa, Artificial Sequence
  Synthetic
AAPYCSGGSCRDAFDI

SEQ ID NO: 9735 - protein, 108 aa, Artificial Sequence; identical to SEQ ID NO: 3387
  Synthetic

SEQ ID NO: 9736 - protein, 9 aa, Artificial Sequence
  Synthetic
QQYGSSPWT

SEQ ID NO: 9737 - protein, 117 aa, Artificial Sequence; identical to SEQ ID NO: 7737
  Synthetic

SEQ ID NO: 9738 - protein, 11 aa, Artificial Sequence
  Synthetic
ARDLVNFGIDY

SEQ ID NO: 9739 - protein, 109 aa, Artificial Sequence; identical to SEQ ID NO: 7739
  Synthetic

SEQ ID NO: 9740 - protein, 11 aa, Artificial Sequence
  Synthetic
QQLNSFPRPIT

SEQ ID NO: 9741 - protein, 128 aa, Artificial Sequence; identical to SEQ ID NO: 7741
  Synthetic

SEQ ID NO: 9742 - protein, 20 aa, Artificial Sequence
  Synthetic
ARDLRYYDSSGYYSGNGMDV

SEQ ID NO: 9743 - protein, 107 aa, Artificial Sequence; identical to SEQ ID NO: 7743
  Synthetic

SEQ ID NO: 9744 - protein, 9 aa, Artificial Sequence
  Synthetic
QQYDNLLYT

SEQ ID NO: 9745 - protein, 115 aa, Artificial Sequence; identical to SEQ ID NO: 7745
  Synthetic

SEQ ID NO: 9746 - protein, 9 aa, Artificial Sequence
  Synthetic
ARESYGMDV

SEQ ID NO: 9747 - protein, 108 aa, Artificial Sequence; identical to SEQ ID NO: 7747
  Synthetic

SEQ ID NO: 9748 - protein, 9 aa, Artificial Sequence
  Synthetic
QQYGSSPGT

SEQ ID NO: 9749 - protein, 119 aa, Artificial Sequence; identical to SEQ ID NO: 7749
  Synthetic

SEQ ID NO: 9750 - protein, 12 aa, Artificial Sequence
  Synthetic
ARFYDSSGSFDY

SEQ ID NO: 9751 - protein, 108 aa, Artificial Sequence; identical to SEQ ID NO: 7751
  Synthetic

SEQ ID NO: 9752 - protein, 10 aa, Artificial Sequence
  Synthetic
LQHNSYPRLT

SEQ ID NO: 9753 - protein, 123 aa, Artificial Sequence; identical to SEQ ID NO: 7733
  Synthetic

SEQ ID NO: 9754 - protein, 16 aa, Artificial Sequence
  Synthetic
AAPYCSGGSCRDAFDI

SEQ ID NO: 9755 - protein, 108 aa, Artificial Sequence; identical to SEQ ID NO: 3387
  Synthetic

SEQ ID NO: 9756 - protein, 9 aa, Artificial Sequence
  Synthetic
QQYGSSPWT

SEQ ID NO: 9757 - protein, 117 aa, Artificial Sequence; identical to SEQ ID NO: 7757
  Synthetic
  misc_feature (58)..(58): Xaa can be any naturally occurring amino acid

SEQ ID NO: 9758 - protein, 11 aa, Artificial Sequence
  Synthetic
ARDLQVRGMDV

SEQ ID NO: 9759 - protein, 106 aa, Artificial Sequence; identical to SEQ ID NO: 7759
  Synthetic

SEQ ID NO: 9760 - protein, 8 aa, Artificial Sequence
  Synthetic
QQANSFPR

SEQ ID NO: 9761 - protein, 129 aa, Artificial Sequence; identical to SEQ ID NO: 7761
  Synthetic

SEQ ID NO: 9762 - protein, 21 aa, Artificial Sequence
  Synthetic
ARHSAHYYDSSGISHWGYFQH

SEQ ID NO: 9763 - protein, 106 aa, Artificial Sequence; identical to SEQ ID NO: 7763
  Synthetic

SEQ ID NO: 9764 - protein, 8 aa, Artificial Sequence
  Synthetic
QQYDNLPT

SEQ ID NO: 9765 - protein, 114 aa, Artificial Sequence; identical to SEQ ID NO: 7765
  Synthetic

SEQ ID NO: 9766 - protein, 8 aa, Artificial Sequence
  Synthetic
ARVVRDTA

SEQ ID NO: 9767 - protein, 108 aa, Artificial Sequence; identical to SEQ ID NO: 7767
  Synthetic

SEQ ID NO: 9768 - protein, 10 aa, Artificial Sequence
  Synthetic
QQYDNLSSLT

SEQ ID NO: 9769 - protein, 131 aa, Artificial Sequence; identical to SEQ ID NO: 7769
  Synthetic

SEQ ID NO: 9770 - protein, 25 aa, Artificial Sequence
  Synthetic
ARMELRDIVVVVAATPASHYNWFDP

SEQ ID NO: 9771 - protein, 107 aa, Artificial Sequence; identical to SEQ ID NO: 7771
  Synthetic

SEQ ID NO: 9772 - protein, 9 aa, Artificial Sequence
  Synthetic
QQTYSTFGT

SEQ ID NO: 9773 - protein, 122 aa, Artificial Sequence; identical to SEQ ID NO: 7773
  Synthetic

SEQ ID NO: 9774 - protein, 16 aa, Artificial Sequence
  Synthetic
ARVSGYSYGYSGTFGY

SEQ ID NO: 9775 - protein, 108 aa, Artificial Sequence; identical to SEQ ID NO: 7775
  Synthetic

SEQ ID NO: 9776 - protein, 10 aa, Artificial Sequence [sequence omitted]

SEQ ID NO: 9777 - protein, 128 aa, Artificial Sequence; identical to SEQ ID NO: 7777
  Synthetic

SEQ ID NO: 9778 - protein, 21 aa, Artificial Sequence
  Synthetic
TKGRRHDRSDYYNRRPDAFDI

SEQ ID NO: 9779 - protein, 107 aa, Artificial Sequence; identical to SEQ ID NO: 7779
  Synthetic

SEQ ID NO: 9780 - protein, 9 aa, Artificial Sequence
  Synthetic
QQYNDWPQA

SEQ ID NO: 9781 - protein, 114 aa, Artificial Sequence; identical to SEQ ID NO: 7765
  Synthetic

SEQ ID NO: 9782 - protein, 8 aa, Artificial Sequence
  Synthetic
ARVVRDTA

SEQ ID NO: 9783 - protein, 108 aa, Artificial Sequence; identical to SEQ ID NO: 7767
  Synthetic

SEQ ID NO: 9784 - protein, 10 aa, Artificial Sequence
  Synthetic
QQYDNLSSLT

SEQ ID NO: 9785 - protein, 115 aa, Artificial Sequence; identical to SEQ ID NO: 7785
  Synthetic

SEQ ID NO: 9786 - protein, 9 aa, Artificial Sequence
  Synthetic
ARESYGMDV

SEQ ID NO: 9787 - protein, 108 aa, Artificial Sequence; identical to SEQ ID NO: 7787
  Synthetic

SEQ ID NO: 9788 - protein, 9 aa, Artificial Sequence
  Synthetic
QQYGSSPGT

SEQ ID NO: 9789 - protein, 114 aa, Artificial Sequence; identical to SEQ ID NO: 7765
  Synthetic

SEQ ID NO: 9790 - protein, 8 aa, Artificial Sequence
  Synthetic
ARVVRDTA

SEQ ID NO: 9791 - protein, 108 aa, Artificial Sequence; identical to SEQ ID NO: 7767
  Synthetic

SEQ ID NO: 9792 - protein, 10 aa, Artificial Sequence
  Synthetic
QQYDNLSSLT

SEQ ID NO: 9793 - protein, 119 aa, Artificial Sequence; identical to SEQ ID NO: 7793
  Synthetic

SEQ ID NO: 9794 - protein, 12 aa, Artificial Sequence
  Synthetic
ARDGVVPPRWDY

SEQ ID NO: 9795 - protein, 107 aa, Artificial Sequence; identical to SEQ ID NO: 7795
  Synthetic
  misc_feature (9)..(10): Xaa can be any naturally occurring amino acid

SEQ ID NO: 9796 - protein, 9 aa, Artificial Sequence
  Synthetic
QQYDNLPLA

SEQ ID NO: 9797 - protein, 116 aa, Artificial Sequence; identical to SEQ ID NO: 7797
  Synthetic

SEQ ID NO: 9798 - protein, 10 aa, Artificial Sequence
  Synthetic
ARMVTYAFDI

SEQ ID NO: 9799 - protein, 108 aa, Artificial Sequence; identical to SEQ ID NO: 7799
  Synthetic

SEQ ID NO: 9800 - protein, 10 aa, Artificial Sequence
  Synthetic
QQYNSYSEIT

SEQ ID NO: 9801 - protein, 114 aa, Artificial Sequence; identical to SEQ ID NO: 7765
  Synthetic

SEQ ID NO: 9802 - protein, 8 aa, Artificial Sequence
  Synthetic
ARVVRDTA

SEQ ID NO: 9803 - protein, 108 aa, Artificial Sequence; identical to SEQ ID NO: 7767
  Synthetic

SEQ ID NO: 9804 - protein, 10 aa, Artificial Sequence
  Synthetic
QQYDNLSSLT

SEQ ID NO: 9805 - protein, 122 aa, Artificial Sequence; identical to SEQ ID NO: 7805
  Synthetic

SEQ ID NO: 9806 - protein, 15 aa, Artificial Sequence
  Synthetic
ARGDSSGWYPLGMDV

SEQ ID NO: 9807 - protein, 112 aa, Artificial Sequence; identical to SEQ ID NO: 7727
  Synthetic

SEQ ID NO: 9808 - protein, 9 aa, Artificial Sequence
  Synthetic
MQALQTPQT

SEQ ID NO: 9809 - protein, 114 aa, Artificial Sequence; identical to SEQ ID NO: 7765
  Synthetic

SEQ ID NO: 9810 - protein, 8 aa, Artificial Sequence
  Synthetic
ARVVRDTA

SEQ ID NO: 9811 - protein, 108 aa, Artificial Sequence; identical to SEQ ID NO: 7767
  Synthetic

SEQ ID NO: 9812 - protein, 10 aa, Artificial Sequence
  Synthetic
QQYDNLSSLT

SEQ ID NO: 9813 - protein, 123 aa, Artificial Sequence; identical to SEQ ID NO: 7813
  Synthetic

SEQ ID NO: 9814 - protein, 17 aa, Artificial Sequence
  Synthetic
ARVRRSSGAGTYWYFDL

SEQ ID NO: 9815 - protein, 107 aa, Artificial Sequence; identical to SEQ ID NO: 7815
  Synthetic

SEQ ID NO: 9816 - protein, 9 aa, Artificial Sequence
  Synthetic
QQLIGYPRT

SEQ ID NO: 9817 - protein, 122 aa, Artificial Sequence; identical to SEQ ID NO: 7817
  Synthetic

SEQ ID NO: 9818 - protein, 15 aa, Artificial Sequence
  Synthetic
AKGGQYYDSSGYGVY

SEQ ID NO: 9819 - protein, 107 aa, Artificial Sequence; identical to SEQ ID NO: 7819
  Synthetic

SEQ ID NO: 9820 - protein, 9 aa, Artificial Sequence
  Synthetic
QQYENLFLT

SEQ ID NO: 9821 - protein, 131 aa, Artificial Sequence; identical to SEQ ID NO: 7821
  Synthetic

SEQ ID NO: 9822 - protein, 23 aa, Artificial Sequence
  Synthetic
ARETLSERITMIVVVPIDRYFDL

SEQ ID NO: 9823 - protein, 107 aa, Artificial Sequence; identical to SEQ ID NO: 7823
  Synthetic

SEQ ID NO: 9824 - protein, 9 aa, Artificial Sequence
  Synthetic
QQYNNWPQT

SEQ ID NO: 9825 - protein, 126 aa, Artificial Sequence; identical to SEQ ID NO: 7825
  Synthetic

SEQ ID NO: 9826 - protein, 19 aa, Artificial Sequence
  Synthetic
ATVVPGYSSSWYYYYGMDV

SEQ ID NO: 9827 - protein, 110 aa, Artificial Sequence; identical to SEQ ID NO: 7827
  Synthetic

SEQ ID NO: 9828 - protein, 11 aa, Artificial Sequence
  Synthetic
QQYGSSPPRLT

SEQ ID NO: 9829 - protein, 118 aa, Artificial Sequence; identical to SEQ ID NO: 7829
  Synthetic

SEQ ID NO: 9830 - protein, 12 aa, Artificial Sequence
  Synthetic
ARGRSGSDAFDI

SEQ ID NO: 9831 - protein, 109 aa, Artificial Sequence; identical to SEQ ID NO: 7831
  Synthetic
  misc_feature (15)..(16): Xaa can be any naturally occurring amino acid

SEQ ID NO: 9832 - protein, 11 aa, Artificial Sequence
  Synthetic
QQRSNWPPRYT

SEQ ID NO: 9833 - protein, 135 aa, Artificial Sequence; identical to SEQ ID NO: 7833
  Synthetic

SEQ ID NO: 9834 - protein, 28 aa, Artificial Sequence
  Synthetic
ARGRVRWGYYDSSGYEYVEPIYYYGLDV

SEQ ID NO: 9835 - protein, 113 aa, Artificial Sequence; identical to SEQ ID NO: 7835
  Synthetic

SEQ ID NO: 9836 - protein, 10 aa, Artificial Sequence
  Synthetic
MQALQTPPCT

SEQ ID NO: 9837 - protein, 122 aa, Artificial Sequence; identical to SEQ ID NO: 7837
  Synthetic

SEQ ID NO: 9838 - protein, 15 aa, Artificial Sequence
  Synthetic
ARGRRDAYNFGGLDV

SEQ ID NO: 9839 - protein, 112 aa, Artificial Sequence; identical to SEQ ID NO: 7839
  Synthetic

SEQ ID NO: 9840 - protein, 9 aa, Artificial Sequence
  Synthetic
MQALQTPDT

SEQ ID NO: 9841 - protein, 121 aa, Artificial Sequence; identical to SEQ ID NO: 7841
  Synthetic

SEQ ID NO: 9842 - protein, 14 aa, Artificial Sequence
  Synthetic
ARDKNLGSDDAFDV

SEQ ID NO: 9843 - protein, 113 aa, Artificial Sequence; identical to SEQ ID NO: 7843
  Synthetic
  misc_feature (15)..(15): Xaa can be any naturally occurring amino acid

SEQ ID NO: 9844 - protein, 9 aa, Artificial Sequence
  Synthetic
HQYYTTPYT

SEQ ID NO: 9845 - protein, 117 aa, Artificial Sequence; identical to SEQ ID NO: 7845
  Synthetic

SEQ ID NO: 9846 - protein, 11 aa, Artificial Sequence
  Synthetic
ARDLSEYGMDV

SEQ ID NO: 9847 - protein, 107 aa, Artificial Sequence; identical to SEQ ID NO: 7847
  Synthetic

SEQ ID NO: 9848 - protein, 9 aa, Artificial Sequence
  Synthetic
QQLNTYVFT

SEQ ID NO: 9849 - protein, 127 aa, Artificial Sequence; identical to SEQ ID NO: 7849
  Synthetic

SEQ ID NO: 9850 - protein, 20 aa, Artificial Sequence
  Synthetic
ARAPDIILVAAAVPVFGFDY

SEQ ID NO: 9851 - protein, 113 aa, Artificial Sequence; identical to SEQ ID NO: 7851
  Synthetic

SEQ ID NO: 9852 - protein, 10 aa, Artificial Sequence
  Synthetic
MQPTQFPPGT

SEQ ID NO: 9853 - protein, 129 aa, Artificial Sequence; identical to SEQ ID NO: 7853
  Synthetic

SEQ ID NO: 9854 - protein, 21 aa, Artificial Sequence
  Synthetic
ARHSAHYYDRSGKFHWGYLHR

SEQ ID NO: 9855 - protein, 106 aa, Artificial Sequence; identical to SEQ ID NO: 7855
  Synthetic

SEQ ID NO: 9856 - protein, 8 aa, Artificial Sequence
  Synthetic
QEYDNLST

SEQ ID NO: 9857 - protein, 117 aa, Artificial Sequence; identical to SEQ ID NO: 7857
  Synthetic

SEQ ID NO: 9858 - protein, 11 aa, Artificial Sequence
  Synthetic
ARDLVVRGFDI

SEQ ID NO: 9859 - protein, 107 aa, Artificial Sequence; identical to SEQ ID NO: 7859
  Synthetic

SEQ ID NO: 9860 - protein, 9 aa, Artificial Sequence
  Synthetic
QQLDNYPPP

SEQ ID NO: 9861 - protein, 125 aa, Artificial Sequence; identical to SEQ ID NO: 7861
  Synthetic

SEQ ID NO: 9862 - protein, 18 aa, Artificial Sequence
  Synthetic
ARDISEGTWATGTDAFDI

SEQ ID NO: 9863 - protein, 106 aa, Artificial Sequence; identical to SEQ ID NO: 7863
  Synthetic

SEQ ID NO: 9864 - protein, 8 aa, Artificial Sequence
  Synthetic
QQYNNWWT

SEQ ID NO: 9865 - protein, 117 aa, Artificial Sequence; identical to SEQ ID NO: 7865
  Synthetic

SEQ ID NO: 9866 - protein, 11 aa, Artificial Sequence
  Synthetic
ARDLVVRGFDI

SEQ ID NO: 9867 - protein, 107 aa, Artificial Sequence; identical to SEQ ID NO: 7867
  Synthetic

SEQ ID NO: 9868 - protein, 9 aa, Artificial Sequence
  Synthetic
QQLNNFPPP

SEQ ID NO: 9869 - protein, 125 aa, Artificial Sequence; identical to SEQ ID NO: 7869
  Synthetic

SEQ ID NO: 9870 - protein, 18 aa, Artificial Sequence
  Synthetic
ARDLSEGTWATGADPLDI

SEQ ID NO: 9871 - protein, 106 aa, Artificial Sequence; identical to SEQ ID NO: 7871
  Synthetic

SEQ ID NO: 9872 - protein, 8 aa, Artificial Sequence
  Synthetic
QQYNNWWT

SEQ ID NO: 9873 - protein, 122 aa, Artificial Sequence; identical to SEQ ID NO: 7873
  Synthetic

SEQ ID NO: 9874 - protein, 16 aa, Artificial Sequence
  Synthetic
ATDYFDSYHYYYGMDV

SEQ ID NO: 9875 - protein, 107 aa, Artificial Sequence; identical to SEQ ID NO: 7875
  Synthetic

SEQ ID NO: 9876 - protein, 9 aa, Artificial Sequence
  Synthetic
QQANSFPYT

SEQ ID NO: 9877 - protein, 120 aa, Artificial Sequence; identical to SEQ ID NO: 7877
  Synthetic

SEQ ID NO: 9878 - protein, 13 aa, Artificial Sequence
  Synthetic
AKLPPSSAVAPDY

SEQ ID NO: 9879 - protein, 106 aa, Artificial Sequence; identical to SEQ ID NO: 7879
  Synthetic

SEQ ID NO: 9880 - protein, 8 aa, Artificial Sequence
  Synthetic
LQHYSWWA

SEQ ID NO: 9881 - protein, 119 aa, Artificial Sequence; identical to SEQ ID NO: 7881
  Synthetic

SEQ ID NO: 9882 - protein, 12 aa, Artificial Sequence
  Synthetic
AKSRRSGGGFDY

SEQ ID NO: 9883 - protein, 107 aa, Artificial Sequence; identical to SEQ ID NO: 7883
  Synthetic

SEQ ID NO: 9884 - protein, 9 aa, Artificial Sequence
  Synthetic
QQLNNYPLT

SEQ ID NO: 9885 - protein, 117 aa, Artificial Sequence; identical to SEQ ID NO: 7885
  Synthetic

SEQ ID NO: 9886 - protein, 11 aa, Artificial Sequence
  Synthetic
ARDLGPYGMDV

SEQ ID NO: 9887 - protein, 108 aa, Artificial Sequence; identical to SEQ ID NO: 7887
  Synthetic

SEQ ID NO: 9888 - protein, 10 aa, Artificial Sequence
  Synthetic
QQLNSYLSLT

SEQ ID NO: 9889 - protein, 129 aa, Artificial Sequence; identical to SEQ ID NO: 7889
  Synthetic

SEQ ID NO: 9890 - protein, 22 aa, Artificial Sequence
  Synthetic
ARGSANYYDRHGHYYVASFLAN

SEQ ID NO: 9891 - protein, 107 aa, Artificial Sequence; identical to SEQ ID NO: 7891
  Synthetic

SEQ ID NO: 9892 - protein, 9 aa, Artificial Sequence
  Synthetic
QQYDNLWLT

SEQ ID NO: 9893 - protein, 117 aa, Artificial Sequence; identical to SEQ ID NO: 7893
  Synthetic

SEQ ID NO: 9894 - protein, 11 aa, Artificial Sequence
  Synthetic
ARDLVVRGMDV

SEQ ID NO: 9895 - protein, 107 aa, Artificial Sequence; identical to SEQ ID NO: 7895
  Synthetic

SEQ ID NO: 9896 - protein, 9 aa, Artificial Sequence
  Synthetic
QQLNSDLGT

SEQ ID NO: 9897 - protein, 118 aa, Artificial Sequence; identical to SEQ ID NO: 7897
  Synthetic

SEQ ID NO: 9898 - protein, 12 aa, Artificial Sequence
  Synthetic
ARGLAAAVSGDY

SEQ ID NO: 9899 - protein, 107 aa, Artificial Sequence; identical to SEQ ID NO: 7899
  Synthetic

SEQ ID NO: 9900 - protein, 9 aa, Artificial Sequence
  Synthetic
QQYNSYPLT

SEQ ID NO: 9901 - protein, 126 aa, Artificial Sequence; identical to SEQ ID NO: 7901
  Synthetic

SEQ ID NO: 9902 - protein, 19 aa, Artificial Sequence
  Synthetic
AKVKLRSQVGVVTAPLFDY

SEQ ID NO: 9903 - protein, 114 aa, Artificial Sequence; identical to SEQ ID NO: 7903
  Synthetic
  misc_feature (15)..(15): Xaa can be any naturally occurring amino acid

SEQ ID NO: 9904 - protein, 10 aa, Artificial Sequence
  Synthetic
QQYYSSSTWT

SEQ ID NO: 9905 - protein, 117 aa, Artificial Sequence; identical to SEQ ID NO: 7905
  Synthetic

SEQ ID NO: 9906 - protein, 11 aa, Artificial Sequence
  Synthetic
ARDRGNDAFDI

SEQ ID NO: 9907 - protein, 109 aa, Artificial Sequence; identical to SEQ ID NO: 7907
  Synthetic

SEQ ID NO: 9908 - protein, 11 aa, Artificial Sequence
  Synthetic
QQLNSYPPLFT

SEQ ID NO: 9909 - protein, 122 aa, Artificial Sequence; identical to SEQ ID NO: 7909
  Synthetic

SEQ ID NO: 9910 - protein, 15 aa, Artificial Sequence
  Synthetic
AKAVYYYESSGYPLH

SEQ ID NO: 9911 - protein, 108 aa, Artificial Sequence; identical to SEQ ID NO: 7911
  Synthetic

SEQ ID NO: 9912 - protein, 10 aa, Artificial Sequence
  Synthetic
QQYDNLSPLT

SEQ ID NO: 9913 - protein, 127 aa, Artificial Sequence; identical to SEQ ID NO: 7913
  Synthetic

SEQ ID NO: 9914 - protein, 20 aa, Artificial Sequence
  Synthetic
AKDHLRCSDTTCYNNYGMDV

SEQ ID NO: 9915 - protein, 111 aa, Artificial Sequence; identical to SEQ ID NO: 7915
  Synthetic

SEQ ID NO: 9916 - protein, 9 aa, Artificial Sequence
  Synthetic
MQGLQTPYT

SEQ ID NO: 9917 - protein, 126 aa, Artificial Sequence; identical to SEQ ID NO: 7917
  Synthetic

SEQ ID NO: 9918 - protein, 19 aa, Artificial Sequence
  Synthetic
ARDRIYDIVGYSFARDFDY

SEQ ID NO: 9919 - protein, 112 aa, Artificial Sequence; identical to SEQ ID NO: 7919
  Synthetic

SEQ ID NO: 9920 - protein, 9 aa, Artificial Sequence
  Synthetic
MQALQTPLT

SEQ ID NO: 9921 - protein, 123 aa, Artificial Sequence; identical to SEQ ID NO: 7921
  Synthetic

SEQ ID NO: 9922 - protein, 16 aa, Artificial Sequence
  Synthetic
AKGGGYYDSGILRWDY

SEQ ID NO: 9923 - protein, 107 aa, Artificial Sequence; identical to SEQ ID NO: 7923
  Synthetic

SEQ ID NO: 9924 - protein, 9 aa, Artificial Sequence
  Synthetic
QQFDNLPLT

SEQ ID NO: 9925 - protein, 124 aa, Artificial Sequence; identical to SEQ ID NO: 7925
  Synthetic

SEQ ID NO: 9926 - protein, 18 aa, Artificial Sequence
  Synthetic
AREGSVGTTHPRGFGMDV

SEQ ID NO: 9927 - protein, 105 aa, Artificial Sequence; identical to SEQ ID NO: 7927
  Synthetic

SEQ ID NO: 9928 - protein, 9 aa, Artificial Sequence
  Synthetic
QQYDNVPPS

SEQ ID NO: 9929 - protein, 126 aa, Artificial Sequence; identical to SEQ ID NO: 7929
  Synthetic

SEQ ID NO: 9930 - protein, 19 aa, Artificial Sequence
  Synthetic
AKGSWFGDGPGFYFYGMDV

SEQ ID NO: 9931 - protein, 107 aa, Artificial Sequence; identical to SEQ ID NO: 7931
  Synthetic

SEQ ID NO: 9932 - protein, 9 aa, Artificial Sequence
  Synthetic
QQYNNWPLT

SEQ ID NO: 9933 - protein, 125 aa, Artificial Sequence; identical to SEQ ID NO: 7933
  Synthetic

SEQ ID NO: 9934 - protein, 18 aa, Artificial Sequence
  Synthetic
TTSPLIESTGTELSYFDS

SEQ ID NO: 9935 - protein, 108 aa, Artificial Sequence; identical to SEQ ID NO: 7935
  Synthetic

SEQ ID NO: 9936 - protein, 10 aa, Artificial Sequence
  Synthetic
QQRSNWQGAT

SEQ ID NO: 9937 - protein, 127 aa, Artificial Sequence; identical to SEQ ID NO: 7937
  Synthetic

SEQ ID NO: 9938 - protein, 19 aa, Artificial Sequence
  Synthetic
ARVRFEYYHESSTYSLPDV

SEQ ID NO: 9939 - protein, 112 aa, Artificial Sequence; identical to SEQ ID NO: 7939
  Synthetic

SEQ ID NO: 9940 - protein, 9 aa, Artificial Sequence
  Synthetic
HQYYDTPET

SEQ ID NO: 9941 - protein, 123 aa, Artificial Sequence; identical to SEQ ID NO: 7941
  Synthetic

SEQ ID NO: 9942 - protein, 16 aa, Artificial Sequence
  Synthetic
AAPYCTGGTCRDAFDI

SEQ ID NO: 9943 - protein, 108 aa, Artificial Sequence; identical to SEQ ID NO: 7943
  Synthetic
  misc_feature (9)..(10): Xaa can be any naturally occurring amino acid

SEQ ID NO: 9944 - protein, 9 aa, Artificial Sequence
  Synthetic
QQYGSSPWT

SEQ ID NO: 9945 - protein, 128 aa, Artificial Sequence; identical to SEQ ID NO: 7945
  Synthetic

SEQ ID NO: 9946 - protein, 21 aa, Artificial Sequence
  Synthetic
ARHSAHYYDSRGISHWGYFQH

SEQ ID NO: 9947 - protein, 106 aa, Artificial Sequence; identical to SEQ ID NO: 7947
  Synthetic

SEQ ID NO: 9948 - protein, 8 aa, Artificial Sequence
  Synthetic
QQYDNLPT

SEQ ID NO: 9949 - protein, 123 aa, Artificial Sequence; identical to SEQ ID NO: 7949
  Synthetic

SEQ ID NO: 9950 - protein, 15 aa, Artificial Sequence
  Synthetic
ARDVLYYDSSGSFDP

SEQ ID NO: 9951 - protein, 112 aa, Artificial Sequence; identical to SEQ ID NO: 7951
  Synthetic

SEQ ID NO: 9952 - protein, 9 aa, Artificial Sequence
  Synthetic
MQALQTPQT

SEQ ID NO: 9953 - protein, 124 aa, Artificial Sequence; identical to SEQ ID NO: 7953
  Synthetic

SEQ ID NO: 9954 - protein, 16 aa, Artificial Sequence
  Synthetic
ARHNYDTSGYPNAFDI

SEQ ID NO: 9955 - protein, 106 aa, Artificial Sequence; identical to SEQ ID NO: 7955
  Synthetic
  misc_feature (12)..(12): Xaa can be any naturally occurring amino acid

SEQ ID NO: 9956 - protein, 8 aa, Artificial Sequence
  Synthetic
QQANSFLT

SEQ ID NO: 9957 - protein, 127 aa, Artificial Sequence; identical to SEQ ID NO: 7957
  Synthetic

SEQ ID NO: 9958 - protein, 19 aa, Artificial Sequence
  Synthetic
ARHPRAATGTWGIWIYFDY

SEQ ID NO: 9959 - protein, 107 aa, Artificial Sequence; identical to SEQ ID NO: 7959
  Synthetic

SEQ ID NO: 9960 - protein, 9 aa, Artificial Sequence
  Synthetic
QQYDNWPLT

SEQ ID NO: 9961 - protein, 127 aa, Artificial Sequence; identical to SEQ ID NO: 7961
  Synthetic

SEQ ID NO: 9962 - protein, 20 aa, Artificial Sequence
  Synthetic
ARDAEITISGVVIPNYGMDV

SEQ ID NO: 9963 - protein, 112 aa, Artificial Sequence; identical to SEQ ID NO: 7963
  Synthetic

SEQ ID NO: 9964 - protein, 9 aa, Artificial Sequence
  Synthetic
MQATQFPQT

SEQ ID NO: 9965 - protein, 119 aa, Artificial Sequence; identical to SEQ ID NO: 7965
  Synthetic

SEQ ID NO: 9966 - protein, 13 aa, Artificial Sequence
  Synthetic
ARGYGDFYWYFDL

SEQ ID NO: 9967 - protein, 108 aa, Artificial Sequence; identical to SEQ ID NO: 7967
  Synthetic

SEQ ID NO: 9968 - protein, 10 aa, Artificial Sequence
  Synthetic
QQGYSMPPPT

SEQ ID NO: 9969 - protein, 117 aa, Artificial Sequence; identical to SEQ ID NO: 7969
  Synthetic
  misc_feature (36)..(37): Xaa can be any naturally occurring amino acid
  misc_feature (40)..(41): Xaa can be any naturally occurring amino acid
  misc_feature (50)..(50): Xaa can be any naturally occurring amino acid

SEQ ID NO: 9970 - protein, 11 aa, Artificial Sequence
  Synthetic
ARDLVSFGMDV

SEQ ID NO: 9971 - protein, 107 aa, Artificial Sequence; identical to SEQ ID NO: 7971
  Synthetic
  misc_feature (9)..(10): Xaa can be any naturally occurring amino acid

SEQ ID NO: 9972 - protein, 9 aa, Artificial Sequence
  Synthetic
QQLNSYSLT

SEQ ID NO: 9973 - protein, 122 aa, Artificial Sequence; identical to SEQ ID NO: 7973
  Synthetic

SEQ ID NO: 9974 - protein, 16 aa, Artificial Sequence
  Synthetic
ARGFLDSSYSSGWYDY

SEQ ID NO: 9975 - protein, 108 aa, Artificial Sequence; identical to SEQ ID NO: 7975
  Synthetic

SEQ ID NO: 9976 - protein, 10 aa, Artificial Sequence
  Synthetic
QQYHNWPALT

SEQ ID NO: 9977 - protein, 122 aa, Artificial Sequence; identical to SEQ ID NO: 7977
  Synthetic

SEQ ID NO: 9978 - protein, 14 aa, Artificial Sequence
  Synthetic
ARDGGDTSDWYFDL

SEQ ID NO: 9979 - protein, 107 aa, Artificial Sequence; identical to SEQ ID NO: 7979
  Synthetic

SEQ ID NO: 9980 - protein, 9 aa, Artificial Sequence
  Synthetic
QKYNSAPFT

SEQ ID NO: 9981 - protein, 117 aa, Artificial Sequence; identical to SEQ ID NO: 7981
  Synthetic

SEQ ID NO: 9982 - protein, 11 aa, Artificial Sequence
  Synthetic
ARDWGEFYFDY

SEQ ID NO: 9983 - protein, 108 aa, Artificial Sequence; identical to SEQ ID NO: 7983
  Synthetic

SEQ ID NO: 9984 - protein, 9 aa, Artificial Sequence
  Synthetic
QQYGSSPRT

SEQ ID NO: 9985 - protein, 122 aa, Artificial Sequence; identical to SEQ ID NO: 7985
  Synthetic

SEQ ID NO: 9986 - protein, 16 aa, Artificial Sequence
  Synthetic
AKEMASHYYFYYGLDV

SEQ ID NO: 9987 - protein, 107 aa, Artificial Sequence; identical to SEQ ID NO: 7987
  Synthetic

SEQ ID NO: 9988 - protein, 9 aa, Artificial Sequence
  Synthetic
QQRSNWPGT

SEQ ID NO: 9989 - protein, 124 aa, Artificial Sequence; identical to SEQ ID NO: 7989
  Synthetic

SEQ ID NO: 9990 - protein, 16 aa, Artificial Sequence
  Synthetic
AAPYCSGGTCRDGFDI

SEQ ID NO: 9991 - protein, 109 aa, Artificial Sequence; identical to SEQ ID NO: 7991
  Synthetic

SEQ ID NO: 9992 - protein, 9 aa, Artificial Sequence
  Synthetic
QQYSISPWT

SEQ ID NO: 9993 - protein, 123 aa, Artificial Sequence; identical to SEQ ID NO: 7993
  Synthetic

SEQ ID NO: 9994 - protein, 16 aa, Artificial Sequence
  Synthetic
AAPYCSGGTCRDGFDI

SEQ ID NO: 9995 - protein, 109 aa, Artificial Sequence; identical to SEQ ID NO: 7995
  Synthetic

SEQ ID NO: 9996 - protein, 9 aa, Artificial Sequence
  Synthetic
QQYSISPWT

SEQ ID NO: 9997 - protein, 117 aa, Artificial Sequence; identical to SEQ ID NO: 7997
  Synthetic

SEQ ID NO: 9998 - protein, 11 aa, Artificial Sequence
  Synthetic
ARDLVVRAFDI

SEQ ID NO: 9999 - protein, 107 aa, Artificial Sequence; identical to SEQ ID NO: 7999
  Synthetic

SEQ ID NO: 10000 - protein, 9 aa, Artificial Sequence
  Synthetic
QQLNSYPPP

SEQ ID NO: 10001 - protein, 130 aa, Artificial Sequence
  Synthetic
EVQLVESGGGLVQPGRSLRLSCAASGFTFDDYAMHWVRQAPGKGLEWVSGISWNSGTIGYADSVKGRFTISRDNAKNSLYLQMNSLRIEDMALYYCARGRKSYYDILTGYYLDDGAFDIWGQGTMVTVSS

SEQ ID NO: 10002 - protein, 23 aa, Artificial Sequence
  Synthetic
ARGRKSYYDILTGYYLDDGAFDI

SEQ ID NO: 10003 - protein, 108 aa, Artificial Sequence
  Synthetic
EIVLTQSPATLSLSPGERATLSCGASQSVSSSFLAWYQQKPGLAPRLLIYDASSRATGIPDRFSGSGSGTDFTLTISRLEPEDFAVYYCLQYGSSPYTFGQGTKLEIK

SEQ ID NO: 10004 - protein, 9 aa, Artificial Sequence
  Synthetic
LQYGSSPYT

SEQ ID NO: 10005 - protein, 123 aa, Artificial Sequence
  Synthetic
EVQLVESGGGLVQPGRSLRLSCAASGFTFDDYAMHWVRQAPGKGLEWVSGISWNSGTIGYADSVKGRFIIIRDNAKNSLYLQMNSLRVEDMALYYCAKDHNRGDPDVWYFDYWGQGTLVTVSS

SEQ ID NO: 10006 - protein, 16 aa, Artificial Sequence
  Synthetic
AKDHNRGDPDVWYFDY

SEQ ID NO: 10007 - protein, 108 aa, Artificial Sequence
  Synthetic
SYVLTQPPSVSVAPGQTARITCGRNNIGSKSVHWYQQKPGQAPVLVVYDDYDRPSGIPERFSGSNSGNTATLTISRVEAGDEADYYCQVWDSSSDHVVFGGGTKLTVL

SEQ ID NO: 10008 - protein, 11 aa, Artificial Sequence
  Synthetic
QVWDSSSDHVV

SEQ ID NO: 10009 - protein, 126 aa, Artificial Sequence
  Synthetic
QVQLVQSGAEVKKPGSSVKVSCKASGGTFSSYAISWVRQAPGQGLEWMGGIIPIFGTANYAQKFQGRVTITADKSTSTAYMELSSLRSEDTAVYYCARDYMTTVPRPSWSYGMDVWGQGTTVTVSS

SEQ ID NO: 10010 - protein, 19 aa, Artificial Sequence
  Synthetic
ARDYMTTVPRPSWSYGMDV

SEQ ID NO: 10011 - protein, 109 aa, Artificial Sequence
  Synthetic
QSVLTQEPSLTVSPGGTVTLTCASSTGAVTSDYYPNWFQQKPGQAPRALIYSTSNKHSWTPARFSGSLLGGKAALTLSGVQPEDEAEYYCLLYYGDAYVFGTGTKVTVL

SEQ ID NO: 10012 - protein, 9 aa, Artificial Sequence
  Synthetic
LLYYGDAYV

SEQ ID NO: 10013 - protein, 114 aa, Artificial Sequence
  Synthetic
EVQLVESGGGLVQPGGSLRLSCAVSGFTVSSNYMNWVRQAPGKGLEWVSIIYSGGSTFYADSVKGRFTISRDNSKNTLYLQMNSLRPEDTAVYYCARQYGDYEWGQGTLVTVSS

SEQ ID NO: 10014 - protein, 8 aa, Artificial Sequence
  Synthetic
ARQYGDYE

SEQ ID NO: 10015 - protein, 107 aa, Artificial Sequence
  Synthetic
DIQMTQSPSSLSASVGDRVTITCQASQDINKYLNWYQQKPGKAPKLLIYDTSNLETGVPSRFSGSGSGTDFTFTISSLQPEDIATYYCQQYDNLPQAFGQGTKLEIK

SEQ ID NO: 10016 - protein, 9 aa, Artificial Sequence
  Synthetic
QQYDNLPQA

SEQ ID NO: 10017 - protein, 125 aa, Artificial Sequence
  Synthetic
QVQLVQSGAEVKKPGSSVKVSCKASGGTFSSYAISWVRQAPGQGLEWMGGLIPIFSTPNYAQNFQGRVTITADKSTSTAYMELSSLRSEDTAVYYCARGYVPTMVRAPAYYFDYWGQGTLVTVSS

SEQ ID NO: 10018 - protein, 18 aa, Artificial Sequence
  Synthetic
ARGYVPTMVRAPAYYFDY

SEQ ID NO: 10019 - protein, 107 aa, Artificial Sequence
  Synthetic
EIVLTQSPATLSLSPGERATLSCRASQSVSSYLAWYQEKPGQAPRLLIYDASSRATGIPARFSGSGSGTDFTLTISSLEPEDFAVYYCQQRSNWPLTFGGGTKVEIK

SEQ ID NO: 10020 - protein, 9 aa, Artificial Sequence
  Synthetic
QQRSNWPLT

SEQ ID NO: 10021 - protein, 121 aa, Artificial Sequence
  Synthetic
EVQLVESGGGLVQPGRSLRLSCAASGFTFDDYAMHWVRQAPGKGLEWVSGISWNSGSIGYGDSVKGRFTISRDNAKNSLYLQMNSLRAEDMALYYCAKGSGYSSSDFPDYWGQGTLVTVSS

SEQ ID NO: 10022 - protein, 14 aa, Artificial Sequence
  Synthetic
AKGSGYSSSDFPDY

SEQ ID NO: 10023 - protein, 107 aa, Artificial Sequence
  Synthetic
  misc_feature (9)..(10): Xaa can be any naturally occurring amino acid
DIQMTQSPXXLSASVGDRVTITCRASQDISSWLAWYQQKPGKAPKLLIYLASSLQSGVPSRFSGSGSGTDFTLTISSLQPEDFATYYCQQANSFPLTFGGGTKVEIK

SEQ ID NO: 10024 - protein, 9 aa, Artificial Sequence
  Synthetic
QQANSFPLT

SEQ ID NO: 10025 - protein, 118 aa, Artificial Sequence
  Synthetic
EVQLVESGGGLVQPGGSLRLSCAASGFTFSSYDMHWVRQPSGKGLEWVSAIGTAGDTYYPDSVKGRFTISRENAKNSLYLQMNSLRAGDTAVYYCARDLYGYWYFDLWGRGTLVTVSS

SEQ ID NO: 10026 - protein, 12 aa, Artificial Sequence
  Synthetic
ARDLYGYWYFDL

SEQ ID NO: 10027 - protein, 108 aa, Artificial Sequence
  Synthetic
DIQMTQSPSSLSASVGDRVTITCRASQSISRYLNWYQQKPGKAPKLLIYAASSLQSGVPSRFSGSGSGTDFTLTISSLQPEDFATYYCQQSYSTPPITFGQGTRLEIK

SEQ ID NO: 10028 - protein, 10 aa, Artificial Sequence
  Synthetic
QQSYSTPPIT

SEQ ID NO: 10029 - protein, 128 aa, Artificial Sequence
  Synthetic
EVQLVESGGGLVQPGRSLRLSCTASGFTFGDYTMNWFRQAPGKGLEWVGFIRSKVYGGTTQYAASVKGRFTISRDDSKSIAYLQMNSLKTEDTAVYFCSRLIWSGYYRSGPQYYFDYWGQGTLVTVSS

SEQ ID NO: 10030 - protein, 19 aa, Artificial Sequence
  Synthetic
SRLIWSGYYRSGPQYYFDY

SEQ ID NO: 10031 - protein, 106 aa, Artificial Sequence
  Synthetic
EIVLTQSPATLSLSPGERATLSCRASQSVSSYLAWYQQKPGQAPRLLIYDASNRATGIPARFSGSGSGTDFTLTISSLEPEDFAVYYCQQRSNWFTFGGGTKVEIK

SEQ ID NO: 10032 - protein, 8 aa, Artificial Sequence
  Synthetic
QQRSNWFT

SEQ ID NO: 10033 - protein, 120 aa, Artificial Sequence
  Synthetic
RLQLQESGPGLVKPSETLSLTCTVSGGSISSSSYYWGWIRQPPGKGLEWIGSMYYSGSTYYNPSLKSRVTISVDTSKNQFTLKLTSVTAADTAVYYCARNLWLRGNFDIWGQGTMATVSS

SEQ ID NO: 10034 - protein, 12 aa, Artificial Sequence
  Synthetic
ARNLWLRGNFDI

SEQ ID NO: 10035 - protein, 110 aa, Artificial Sequence
  Synthetic
NFMLTQPHSVSESPGKTVTISCTHSSGSIASNYVHWYQQRPGSSPTTVIYEDNQRPSGVPDRFSGSIDSSSNSASLTISGLKTEDEADYYCQSYDSSNWVFGGGTKLTVL

SEQ ID NO: 10036 - protein, 9 aa, Artificial Sequence
  Synthetic
QSYDSSNWV

SEQ ID NO: 10037 - protein, 120 aa, Artificial Sequence
  Synthetic
QVQLVQSGAEVKKPGSSVKVSCKASGDTFSSYVISWVRQAPGQGLECMGGIIPIFGTANYAQKFQGRVTITADKLTSTAYMELSSLRSEDTAVYYCARGRSGYYTGFDYWGQGTLVTVSS

SEQ ID NO: 10038 - protein, 13 aa, Artificial Sequence
  Synthetic
ARGRSGYYTGFDY

SEQ ID NO: 10039 - protein, 111 aa, Artificial Sequence
  Synthetic
NFVLTQPHSVSESPGKTVTISCTRSSGSIASNYVQWYQQRPGSSPTTVIYEDNQRPSGVPDRFSGSIDSSSNSASLPLSGLKTEDEADYYCQSYDTSNLYVFGTGTKVTVL

SEQ ID NO: 10040 - protein, 10 aa, Artificial Sequence
  Synthetic
QSYDTSNLYV

SEQ ID NO: 10041 - protein, 123 aa, Artificial Sequence
  Synthetic
EVQLVESGGGLVQPGGSLRLSCAASGFTFSSYNMNWVRQAPGKGLEWVSYISSSSSTIYYADSVKGRFTISRDNAKNSLFLQMNSLRAEDTAVYYCARGLGVRSYYYYGLDVWGQGTTVTVSS

SEQ ID NO: 10042 - protein, 16 aa, Artificial Sequence
  Synthetic
ARGLGVRSYYYYGLDV

SEQ ID NO: 10043 - protein, 107 aa, Artificial Sequence
  Synthetic
DIQMTQSPSSLSASVGDRVTITCRASQSINSYLNWYQQKPGKAPQLLIYAASSLQSGVPSRFSGSGSGTDFTLTISSLQPEDFATYYCQQSYSTPSTFGQGTKLEIK

SEQ ID NO: 10044 - protein, 9 aa, Artificial Sequence
  Synthetic
QQSYSTPST

SEQ ID NO: 10045 - protein, 130 aa, Artificial Sequence
  Synthetic
QVQLVQSGAEVKKPGASVKVSCKASGYTFTTYGISWVRQAPGQGLEWMGWISVYNGYTSYAQKLQGRVTMTTDTSTSTAYMELRSLRSDDTAVYYCAREGYCSSSSCDTAYYYYYGMDVWGQGTTVTVSS

SEQ ID NO: 10046 - protein, 23 aa, Artificial Sequence
  Synthetic
AREGYCSSSSCDTAYYYYYGMDV

SEQ ID NO: 10047 - protein, 106 aa, Artificial Sequence
  Synthetic
EIVLTQSPATLSLSPGERATLSCRASQSVSNYLAWYQQKPGQAPRLLIYDASNRATGIPARFSGSGSGTDFTLTISSLEPEDFAVYYCQQRSSWGTFGQGTKVEIK

SEQ ID NO: 10048 - protein, 8 aa, Artificial Sequence
  Synthetic
QQRSSWGT

SEQ ID NO: 10049 - protein, 120 aa, Artificial Sequence
  Synthetic
QVQLVESGGGVVQPGRSLRLSCAASGFTFSSYGMHWVRQAAGKGLEWVAVISYDGSFKYYADSVKGRFTISRDNSKNTLYLQMNSLRAEDTAMYYCAKEFGTTVTWFDYWGQGTLVTVSS

SEQ ID NO: 10050 - protein, 13 aa, Artificial Sequence
  Synthetic
AKEFGTTVTWFDY

SEQ ID NO: 10051 - protein, 108 aa, Artificial Sequence
  Synthetic
DIQMTQSPSSLSASVGDRVTITCRASQSISSYLNWYQQKPGKAPKLLIYDASSLQSGVPSRFSGSGSGTDFTLTISSLQPEDFATYYCQQSYSTPSWTFGQGTKVEIK

SEQ ID NO: 10052 - protein, 10 aa, Artificial Sequence
  Synthetic
QQSYSTPSWT

SEQ ID NO: 10053 - protein, 127 aa, Artificial Sequence
  Synthetic
QVQLVQSGAEVKKPGASVKVSCTASGYTFTGYYIHWVRQAPGQGLEWMGWINPNSGGTSYSQKFQGRVTMTRDTSISTAYMDLNRLTSDDTAVFYCAIRYCTSSSCPSDYFYGMDVWGQGTTVTVSS

SEQ ID NO: 10054 - protein, 20 aa, Artificial Sequence
  Synthetic
AIRYCTSSSCPSDYFYGMDV

SEQ ID NO: 10055 - protein, 109 aa, Artificial Sequence
  Synthetic
QFVLTQEPSLTVSPGGTVTLTCGSNTGAVTSGHFPYWFQQKPGQAPRTLIYDTTNKHSWTPARFSGSLLGGKAALTLSGAQPEDEAEYYCLLSYSGGRVFGGGTKVTVL

SEQ ID NO: 10056 - protein, 9 aa, Artificial Sequence
  Synthetic
LLSYSGGRV

SEQ ID NO: 10057 - protein, 116 aa, Artificial Sequence
  Synthetic
EVQLVESGGGLIQPGGSLRLSCAASGVTVSRNYMSWVRQAPGKGLEWVSVIYSGGSTFYADSVKGRFTISRDHSKNALYLQMNSLRAEDTAVYYCARAVADAFDIWGQGTVVTVSS

SEQ ID NO: 10058 - protein, 10 aa, Artificial Sequence
  Synthetic
ARAVADAFDI

SEQ ID NO: 10059 - protein, 109 aa, Artificial Sequence
  Synthetic
DIQLTQSPSFLSASVGDRVTITCRASQGISSYLAWYQQKPGKAPKLLIYAASTLQSGVPSRFSGSGSGTEFTLTISSLQPEDFATYYCQQLNSYPSALTFGGGTKVEIK

SEQ ID NO: 10060 - protein, 11 aa, Artificial Sequence
  Synthetic
QQLNSYPSALT

SEQ ID NO: 10061 - protein, 127 aa, Artificial Sequence
  Synthetic
QVQLVESGGGVVQPGRSLRLSCAASGFLFSGYTMHWVRQAPGKGLEWVAVISYDGSNKYYADSVKGRFTISRDNSKNTLYLQMNSLRPEDTAVYYCARDPVYCSSSSCAPGDWFDPWGQGTLVTVSS

SEQ ID NO: 10062 - protein, 20 aa, Artificial Sequence
  Synthetic
ARDPVYCSSSSCAPGDWFDP

SEQ ID NO: 10063 - protein, 110 aa, Artificial Sequence
  Synthetic
SYVLTQPPSVSVAPGKTARITCGGNNIGSKSVHWYQQKPGQAPVLVIYYDNDRPSGIPERFSGSNSGNTATLTISRVEAGDEADYFCQVWDSTSGHPGWVFGGGTKLTVL

SEQ ID NO: 10064 - protein, 13 aa, Artificial Sequence
  Synthetic
QVWDSTSGHPGWV

SEQ ID NO: 10065 - protein, 130 aa, Artificial Sequence
  Synthetic
QVQLVQSGAEVKKPGASVKVSCKASGYTFTNYGISWVRQAPGQGLEWMGWISAYNGYTNYAENLQGRVTMTTDTSTSTAYMDLRSLRSDDTAVYYCATEGHCSGGSCYSGNYSYYGMDVWGQGTTVTVSS

SEQ ID NO: 10066 - protein, 23 aa, Artificial Sequence
  Synthetic
ATEGHCSGGSCYSGNYSYYGMDV

SEQ ID NO: 10067 - protein, 106 aa, Artificial Sequence
  Synthetic
EIVLTQSPVSLSLSPGERATLSCRASQSVSSYLAWYQQKPGQAPRLLIYDASNRATGIPARFSGSGSGTDFTLTISSLEPEDFAVYYCQQRSNRGTFGQGTKVEIK

SEQ ID NO: 10068 - protein, 8 aa, Artificial Sequence
  Synthetic
QQRSNRGT

SEQ ID NO: 10069 - protein, 129 aa, Artificial Sequence
  Synthetic
EVQLLESGGGLVQPGGSLRLSCAASGFTFSSYAMSWVRQAPGKGLEWVSAISGSGDITYYADSVKGRFTISRDNSKNTLYLQMNSLRAEDTAVYYCAKEISSYYYDSSGYRTYWYFDLWGRGTLVTVSS

SEQ ID NO: 10070 - protein, 22 aa, Artificial Sequence
  Synthetic
AKEISSYYYDSSGYRTYWYFDL

SEQ ID NO: 10071 - protein, 108 aa, Artificial Sequence
  Synthetic
DIQMTQSPSSLSASVGDRVTITCRASQSISSYLNWYQQKPGKAPKLLIYAASSLQSGVPSRFSGSGSGTDFTLTISSLQPEDFATYYCQQSYSSPPFTFGPGTKVEIK

SEQ ID NO: 10072 - protein, 10 aa, Artificial Sequence
  Synthetic
QQSYSSPPFT

SEQ ID NO: 10073 - protein, 123 aa, Artificial Sequence
  Synthetic
QVQLVESGGDVVQPGRSLRLSCAASGFTFSNYGMHWVRQAPGKGLEWVAVISYDGSDKYFADSVKGRFTISRDISKNTLYLQMNSLRAEDTAVYYCAKTGATHYYYYYGMDVWGQGTTVTVSS

SEQ ID NO: 10074 - protein, 16 aa, Artificial Sequence
  Synthetic
AKTGATHYYYYYGMDV

SEQ ID NO: 10075 - protein, 112 aa, Artificial Sequence
  Synthetic
QSVLTQPASVSGSPGQSITISCTGTSSDVGGYNYVSWYQQHPGKAPKLMIYEVSDRPSGVSNRFSGSKSGNTASLTISGLQAEDEADYYCSSYTSSTTLLYVFGTGTKVTVL

SEQ ID NO: 10076 - protein, 12 aa, Artificial Sequence
  Synthetic
SSYTSSTTLLYV

SEQ ID NO: 10077 - protein, 130 aa, Artificial Sequence
  Synthetic
QVQLQESGPGLVKPSQTLSLTCTVSGGSISSGGYLWSWIRQHPGKGLEWIGYIYYSGSTYYNPSLKSLVTISVDTSKNEFSLKLSSVTAADTAVYYCARAKGDYYDSSGYYSPAIYFDYWGQGTLVTVSS

SEQ ID NO: 10078 - protein, 22 aa, Artificial Sequence
  Synthetic
ARAKGDYYDSSGYYSPAIYFDY

SEQ ID NO: 10079 - protein, 108 aa, Artificial Sequence
  Synthetic
EIVLTQSPATLSLSPGERATLSCGASQSVSSSYLAWYQQKPGLAPRLLIYDASRRATGIPDRFSGSGSGTDFTLTISRLEPEDFAVYYCQQYGGSPFTFGPGTKVDIK

SEQ ID NO: 10080 - protein, 9 aa, Artificial Sequence
  Synthetic
QQYGGSPFT

SEQ ID NO: 10081 - protein, 122 aa, Artificial Sequence
  Synthetic
EVQLVESGGGLVQPGGSLRLSCAASGFTFSNYDMHWVRQPTGKGLEWVSAIGTAGDTYYADSVKGRFTISRDNAKNSLYLQMNSLRAGDTAVYYCARGYYDSSGYYNWFDPWGQGTLVTVSS

SEQ ID NO: 10082 - protein, 16 aa, Artificial Sequence
  Synthetic
ARGYYDSSGYYNWFDP

SEQ ID NO: 10083 - protein, 108 aa, Artificial Sequence
  Synthetic
DIQMTQSPSSLSASVGDRVTITCRASQSISSYLNWYQQKPGKAPKLLIYAASSLQSGVPSRFSGSGSGTDFTLTISSLQPEDFATYYCQQSYSMPPWTFGQGTKVEIK

SEQ ID NO: 10084 - protein, 10 aa, Artificial Sequence
  Synthetic
QQSYSMPPWT

SEQ ID NO: 10085 - protein, 132 aa, Artificial Sequence
  Synthetic
EVQLVESGGGLVQPGRSLRLSCAASGFTFDDYAMHWVRQAPGKGLEWVSGISWNSDSIGYADSVKGRFTISRDNAKNSLYLQMNSLRAEDTALYYCAKGIEHCSSTNCPRDDYYYYYGMDVWGQGTTVTVSS

SEQ ID NO: 10086 - protein, 25 aa, Artificial Sequence
  Synthetic
AKGIEHCSSTNCPRDDYYYYYGMDV

SEQ ID NO: 10087 - protein, 107 aa, Artificial Sequence
  Synthetic
SYVLTQQPPSVSVSPGQTASITCSGDKLGDKYACWYQQKPGQSPVLVIYQDSKRPSGIPERFSGSNSGNTATLTISGTQAMDEADYYCQAWDSRIVVFGGGTKLTVL

SEQ ID NO: 10088 - protein, 9 aa, Artificial Sequence
  Synthetic
QAWDSRIVV

SEQ ID NO: 10089 - protein, 117 aa, Artificial Sequence
  Synthetic
EVQLVETGGGLIQPGGSLRLSCAASGFTVSSNYMSWVRQAPGKGLEWVSVIYSGGSTYYADSVKGRFTISRDNSKNTLYLQMNSLRAEDTAIYYCVHDYGDFYFDFWGQGTLVTVSS

SEQ ID NO: 10090 - protein, 11 aa, Artificial Sequence
  Synthetic
VHDYGDFYFDF

SEQ ID NO: 10091 - protein, 108 aa, Artificial Sequence
  Synthetic
EIVLTQSPGTLSLSPGERATLSCRASQSLSSSYLAWYQQKPGQAPRLLIYGASSRATGIPDRFSGSGSGTDFTLTISRLEPEDFAVYYCQQYGSSPRTFGQGTKLEIK

SEQ ID NO: 10092 - protein, 9 aa, Artificial Sequence
  Synthetic
QQYGSSPRT

SEQ ID NO: 10093 - protein, 127 aa, Artificial Sequence
  Synthetic
EVQLVESGGGLVQPGGSLRLSCAASGFTFSSYSMNWVRQAPGKGLEWVSYISSSSSTIYYADSVKGRFTISRDNAKNSLYLQMNSLRAEDTAVYYCARDRATYYDFWSQPAEYFQHWGQGTLVTVSS

SEQ ID NO: 10094 - protein, 20 aa, Artificial Sequence
  Synthetic
ARDRATYYDFWSQPAEYFQH

SEQ ID NO: 10095 - protein, 110 aa, Artificial Sequence
  Synthetic
QFVLTQPRSVSGSPGQSVTISCTGTSSDVGGYNYVSWYQQHPGKAPKLMIYDVSKRPSGVPDRFSGSKSGNTASLTISGLQAEDEADYYCCSYAGSYFYVFGTGTKVTVL

SEQ ID NO: 10096 - protein, 10 aa, Artificial Sequence
  Synthetic
CSYAGSYFYV

SEQ ID NO: 10097 - protein, 129 aa, Artificial Sequence
  Synthetic
QVQLVQSGAEVKKPGASVKVSCKASGYTFTSYYMHWVRQAPGQGLEWMGIINPSGGSTSYAQKFQGRITMTRDTSTSTVYMELSSLRSEDTAVYYCTRDLRAYYDRSGYYVYGIGTDYWGQGTLVTVSS

SEQ ID NO: 10098 - protein, 22 aa, Artificial Sequence
  Synthetic
TRDLRAYYDRSGYYVYGIGTDY

SEQ ID NO: 10099 - protein, 111 aa, Artificial Sequence
  Synthetic
NFMLTQPHSVSESPGKTVTISCTRSSGSIASNYVQWYQQRPGSSPTTVISEDNQRPSGVPDRFSGSIDSSSNSASLTISGLKTEDEADYYCQSYDGSNHWVFGGGTKLTVL

SEQ ID NO: 10100 - protein, 10 aa, Artificial Sequence
  Synthetic
QSYDGSNHWV

SEQ ID NO: 10101 - protein, 130 aa, Artificial Sequence
  Synthetic
QVQLVQSGAEVKKPGASVKVSCKASSHTFTRYGISWVRQAPGQGLEWMGWISVYNGNTNYAQKLQGRVTMTTDTSTSTAYMELRSLRSDDTAVYYCAREGNCSSTSCYSGYYSYYGMDVWGQGTTVTVSS

SEQ ID NO: 10102 - protein, 23 aa, Artificial Sequence
  Synthetic
AREGNCSSTSCYSGYYSYYGMDV

SEQ ID NO: 10103 - protein, 105 aa, Artificial Sequence
  Synthetic
EIVLTQSPATLSLSPGERATLSCRASQSVSSYLAWYQQKPGQAPRLLIYDASNRATGIPARFSGSGSGTDFTLTISSLEPEDFAVYYCQQRSNRGTFGGGTKVEI

SEQ ID NO: 10104 - protein, 8 aa, Artificial Sequence
  Synthetic
QQRSNRGT

SEQ ID NO: 10105 - protein, 123 aa, Artificial Sequence
  Synthetic
EVQLVESGGGLVQPGRSLRLSCAASGFTFDDYAMHWVRQAPGKGLEWVSGISWNSGSIAYADSVKGRFTISRDNAKNSLYLQMNSLRAEDTALYYCAKVASSTRFVWGDFDIWGQGTMVTVSS

SEQ ID NO: 10106 - protein, 16 aa, Artificial Sequence
  Synthetic
AKVASSTRFVWGDFDI

SEQ ID NO: 10107 - protein, 108 aa, Artificial Sequence
  Synthetic
EIVMTQSPATLSVSPGERATLSCRASQSVSSNLAWYQQKPGQAPRLLIYGASTRATGIPARFSGSGSGTEFTLTINSLQSEDFAVYYCQQYNNWPPITFGQGTRLEIK

SEQ ID NO: 10108 - protein, 10 aa, Artificial Sequence
  Synthetic
QQYNNWPPIT

SEQ ID NO: 10109 - protein, 120 aa, Artificial Sequence
  Synthetic
QVQLQESGPGLVKPSETLSLSCTVSGSSISTYYYWGWIRQPPGKGLEWIGNIYHSGSTYYNPSLKSRVTISIDTSKNQFSLRLSSVTAADTAVYYCARAGSGSYYTLDYWGQGTLVTVSS

SEQ ID NO: 10110 - protein, 13 aa, Artificial Sequence
  Synthetic
ARAGSGSYYTLDY

SEQ ID NO: 10111 - protein, 106 aa, Artificial Sequence
  Synthetic
DIQMTQSPSSLSASVGDRVTITCQASQDISNYLNWYQQKPGKAPKLLIYDASNLETGVPSRFSGSGSGTDFTFTISSLQPEDIATYYCQQYGNLLTFGGGTKVEIK

SEQ ID NO: 10112 - protein, 8 aa, Artificial Sequence
  Synthetic
QQYGNLLT

SEQ ID NO: 10113 - protein, 122 aa, Artificial Sequence
  Synthetic
EVQLVESGGGLAQPGGSLRLSCAASGFTFSSYDMHWVRQATGKGLEWVSAIGTAGDTYYPGSVKGRFTISRENAKNSLYLQMNSLRVGDTAVYYCARGPRGTAMVNGWFDPWGQGTLVTVSS

SEQ ID NO: 10114 - protein, 16 aa, Artificial Sequence
  Synthetic
ARGPRGTAMVNGWFDP

SEQ ID NO: 10115 - protein, 108 aa, Artificial Sequence
  Synthetic
EIVMTQSPATLSVSPGERATLSCRASQSVSSSLAWYQQKPGQAPRLLIYGASTRATGIPARFSGSGSGTEFTLTISSLQSEDFAVYYCQQYNNWPPLTFGGGTKVEIK

SEQ ID NO: 10116 - protein, 10 aa, Artificial Sequence
  Synthetic
QQYNNWPPLT

SEQ ID NO: 10117 - protein, 121 aa, Artificial Sequence
  Synthetic
QVQLVESGGGVVQPGRSLRLSCAASRFIFSSYAMHWVRQAPGKGLEWVAIISYDGSNKNYADSVKGRFTISRDNSKNTLYLQMNSLRAEDTAVYYCARDPSRYSYGYFDYWGQGTLVTVSS

SEQ ID NO: 10118 - protein, 14 aa, Artificial Sequence
  Synthetic
ARDPSRYSYGYFDY

SEQ ID NO: 10119 - protein, 106 aa, Artificial Sequence
  Synthetic
EIVMTQSPATLSVSPGERATLSCRASQTVSSNLAWYQQKPGQAPRLLIYGASTRATGIPARFGGSGSGTEFTLTISSLQSEDFAVYYCQQYNHWNTFGQGTKLEIK

SEQ ID NO: 10120 - protein, 8 aa, Artificial Sequence
  Synthetic
QQYNHWNT

SEQ ID NO: 10121 - protein, 122 aa, Artificial Sequence
  Synthetic
QVQLVQSGAEVKKPGASVKVSCKASGYTFTGYYMYWVRQAPGQGLEWMGWINPNSGATNYAQKFQGRVTMTRDTSISTVYMELSRLTSDDTAVYYCARGVTYNWNVEGEEYWGQGTLVTVSS

SEQ ID NO: 10122 - protein, 15 aa, Artificial Sequence
  Synthetic
ARGVTYNWNVEGEEY

SEQ ID NO: 10123 - protein, 110 aa, Artificial Sequence
  Synthetic
  misc_feature (4)..(5): Xaa can be any naturally occurring amino acid
QSVXXQPASVSGSPGQSITISCTGTSSDVGGYYFVSWYQQHPGKAPKLMIYDVSNRPSGVSNRFSGSKSGNTASLTISGLQAEDEADYYCSSYTSSSSYVFGTGTKVTVL

SEQ ID NO: 10124 - protein, 10 aa, Artificial Sequence
  Synthetic
SSYTSSSSYV

SEQ ID NO: 10125 - protein, 118 aa, Artificial Sequence
  Synthetic
EVQLVQSGAEVKKSGESLKISCKGSGYSFISHWIGWVRQMPGKGLEWMGIIYPGDSDTRYSPSFQGQVTISADKSISTAYLQWSSLKASDTAMYYCARRGPSQEFDPWGQGTLVIVSS

SEQ ID NO: 10126 - protein, 11 aa, Artificial Sequence
  Synthetic
ARRGPSQEFDP

SEQ ID NO: 10127 - protein, 110 aa, Artificial Sequence
  Synthetic
QFVLTQPPSASGTPGQRVTISCSGSSSNIGSNYVYWYQQLPGTAPKLLIYRNNQRPSGVPDRFSGSKSGTSASLAISGLRSEDEADYYCAAWDDSLSGPVFGGGTKLTVL

SEQ ID NO: 10128 - protein, 11 aa, Artificial Sequence
  Synthetic
AAWDDSLSGPV

SEQ ID NO: 10129 - protein, 128 aa, Artificial Sequence
  Synthetic
QVQLQESGPGLVKPSQTLSLTCTVSGGSINSGSYYWSWVRQPAGKGLEWIGRIYTNGVTNYNPSVKSRVTISVDTSKNQFSLNLSSVTAADTAVYYCARDSGYDPRPPYYYYYGMDVWGQGTTVTVSS

SEQ ID NO: 10130 - protein, 20 aa, Artificial Sequence
  Synthetic
ARDSGYDPRPPYYYYYGMDV

SEQ ID NO: 10131 - protein, 108 aa, Artificial Sequence
  Synthetic
EIVLTQSPGTLSLSPGERATLSCRASQSVSSRYFAWYQQKPGQAPRLLIYGASSRASGIPDRFSGSGSGTDFTLTISRLEPEDFAVYYCQQYGSSPFTFGPGAKVDIK

SEQ ID NO: 10132 - protein, 9 aa, Artificial Sequence
  Synthetic
QQYGSSPFT

SEQ ID NO: 10133 - protein, 123 aa, Artificial Sequence
  Synthetic
EVQLVESGGGLVQPGGSLRLSCAASGFIFSSYSMNWVRQAPGKGLEWISYISDISSTIYYADSVKGRFTISRDNAKNSLYLHMNSLRDEDTAVYYCARHLGGDYGRWWWFDPWGQGTLVTVSS

SEQ ID NO: 10134 - protein, 16 aa, Artificial Sequence
  Synthetic
ARHLGGDYGRWWWFDP

SEQ ID NO: 10135 - protein, 110 aa, Artificial Sequence
  Synthetic
QFVLTQPPSVSAAPGQKVTISCSGSSSNIGSNYVSWYQQLPGTAPKLLIYENNKRPSGIPDRFSGSKSGTSATLGITGLQTGDEADYYCGTWDSSLSAYVFATGTKVTVL

SEQ ID NO: 10136 - protein, 11 aa, Artificial Sequence
  Synthetic
GTWDSSLSAYV

SEQ ID NO: 10137 - protein, 123 aa, Artificial Sequence
  Synthetic
QVQLVQSGAEVKKPGASVKVSCKASGYTFTAYYIHWVRQAPGQGLEWMGWISPISGGTNYAQKFQGRVTVTRDTSITTVYMELSRLRSDDMAVYYCARDAPTYSSGWSSFDPWGQGTLVTVSS

SEQ ID NO: 10138 - protein, 16 aa, Artificial Sequence
  Synthetic
ARDAPTYSSGWSSFDP

SEQ ID NO: 10139 - protein, 110 aa, Artificial Sequence
  Synthetic
  misc_feature (2)..(2): Xaa can be any naturally occurring amino acid
QXVLTQPASVSGSPGQSITFSCTGTSSDVGSYNLVSWYQQHPGKAPKLMIYEVSERPSGVSNRFSGSKSGNTASLTISGLQAEDEADYYCCSYAGSSTLVFGGGTKLTFL

SEQ ID NO: 10140 - protein, 10 aa, Artificial Sequence
  Synthetic
CSYAGSSTLV

SEQ ID NO: 10141 - protein, 127 aa, Artificial Sequence
  Synthetic
QVQLVESGGGVVQPGRSLRLSCAASGFTFSKYGMHWVRQAPGKGLEWVAVISYDGSDKNYADSVKGRFTISRDNSKNTLYLQMNSLRAEDTAVYYCAKVTGSYCSGGSCYSGDFDYWGQGTLVTVSS

SEQ ID NO: 10142 - protein, 20 aa, Artificial Sequence
  Synthetic
AKVTGSYCSGGSCYSGDFDY

SEQ ID NO: 10143 - protein, 107 aa, Artificial Sequence
  Synthetic
DIQMTQSPSSLSASVGDRVTITCRASQRISSYLNWYQQKPGKVPKLLIYAASSLESGVPSRFSGSGSGTDFTLTISSLQPEDFGTYYCQQSYSTPYTFGQGTKLEIK

SEQ ID NO: 10144 - protein, 9 aa, Artificial Sequence
  Synthetic
QQSYSTPYT

SEQ ID NO: 10145 - protein, 123 aa, Artificial Sequence
  Synthetic
EVQLVESGGGLVKPGGSLRLSCAASGFAFSTYNMNWVRQAPGKGLEWVSSISSSSSYIYYADSLKGRFTISRDNANNSLYLQMNSLRAEDTAVYYCAREWGRGRSNRGAFDYWGQGTLVTVSS

SEQ ID NO: 10146 - protein, 16 aa, Artificial Sequence
  Synthetic
AREWGRGRSNRGAFDY

SEQ ID NO: 10147 - protein, 112 aa, Artificial Sequence
  Synthetic
DIVMTQSPLSLPVTPGEPASISCRSSQSLLHSNGYNYLDWYLQKPGQSPQLLIYLGSNRASGVPDRFSGSGSGTDFTLKISRVEAEDGGVYYCMQALQTPQTFGQGTKVEIK

SEQ ID NO: 10148 - protein, 9 aa, Artificial Sequence
  Synthetic
MQALQTPQT

SEQ ID NO: 10149 - protein, 125 aa, Artificial Sequence
  Synthetic
QVQLVQSGAEVKKPGSSVKVSCKASGGTFSSYAISWVRQAPGQGLEWMGGLIPIFGTPNYAQKFRGRVTISADKSTSTAYMELSSLRSEDTAVYFCARGYVPTMVRAPAYYFDYWGQGTLVTVTS

SEQ ID NO: 10150 - protein, 18 aa, Artificial Sequence
  Synthetic
ARGYVPTMVRAPAYYFDY

SEQ ID NO: 10151 - protein, 107 aa, Artificial Sequence
  Synthetic
EIVLTQSPATLSLSPGERATLSCRASQSVSSYLAWYQQKPGQAPRLLIYDASNRATGIPARFSGSGSGTDFTLTISSLEPEDFAVYYCQQRTNWPLTFGGGTKVEIK

SEQ ID NO: 10152 - protein, 9 aa, Artificial Sequence
  Synthetic
QQRTNWPLT

SEQ ID NO: 10153 - protein, 121 aa, Artificial Sequence
  Synthetic
QVQLVQSGAEVKKPGASVKVSCKASGNTFTSYGISWVRQAPGQGLEWMGWISAYNGNTNYAQKLQGRVTMTTDTSTSTAYMELRSLRSDDTAVYYCASSGGYSSGWWFDYWGQGTLVTVSS

SEQ ID NO: 10154 - protein, 14 aa, Artificial Sequence
  Synthetic
ASSGGYSSGWWFDY

SEQ ID NO: 10155 - protein, 110 aa, Artificial Sequence
  Synthetic
QFVLTQPPSASGTPGQRVTISCSGSSSNIGSNYVYWYQQLPGKAPKLLIYSNNQRPSGVPDRFSGSKSGTSASLAISGLRSEDETDYYCAAWDDSLSGPVFGGGTKLTVL

SEQ ID NO: 10156 - protein, 11 aa, Artificial Sequence
  Synthetic
AAWDDSLSGPV

SEQ ID NO: 10157 - protein, 125 aa, Artificial Sequence
  Synthetic
QVQLVQSGAEVKKPGASVKVSCKASGYTFTGYYIHWVRQAPGQGLEWMGWINPISGGTNYAQKFQGRVTMTRDTSITTAYMELSRLRSDDTAVYYCARVPYYYDSSGYYSSFLDWGQGTLVTVSS

SEQ ID NO: 10158 - protein, 18 aa, Artificial Sequence
  Synthetic
ARVPYYYDSSGYYSSFLD

SEQ ID NO: 10159 - protein, 110 aa, Artificial Sequence
  Synthetic
QFVLTQPASVSGSPGQSITISCSGTSSDVGSYNLVSWYQQHPGKAPKLMIYEVSKRPSGVSNRFSGSKSGNTASLTISGLQAEDEADYYCCSYVSSSTLVFGGGTKLTVL

SEQ ID NO: 10160 - protein, 10 aa, Artificial Sequence
  Synthetic
CSYVSSSTLV

SEQ ID NO: 10161 - protein, 126 aa, Artificial Sequence
  Synthetic
QLQLQESGPGLVKPSETLSLTCTVSGGSISSSSYYWGWIRQPPGKGLEWIGSIYYSGSTYFHPSLKSRVTISVDTSKNQFSLKLSSVTAADTAVYYCARGRFLTMMIVWGGLFDYWGQGTLVTVSS

SEQ ID NO: 10162 - protein, 18 aa, Artificial Sequence
  Synthetic
ARGRFLTMMIVWGGLFDY

SEQ ID NO: 10163 - protein, 112 aa, Artificial Sequence
  Synthetic
DIVMTQSPDSLAVSLGERATINCKSSQSVLYSSNNKNYLAWYQQKPGQPPKLLIYWASTRESGVPDRFSGSGSGTDFTLTISSLQAEDVAVYYCQQYYSTWAFGGGTKVEIK

SEQ ID NO: 10164 - protein, 8 aa, Artificial Sequence
  Synthetic
QQYYSTWA

SEQ ID NO: 10165 - protein, 125 aa, Artificial Sequence
  Synthetic
QVQLVESGGGVVQPGRSLRLSCAASGFIFSAYPMHWVRQAPGKGLEWVAVISYDGSNKYYADSVKGRFTISRDNSKNTLYLQVNSLRAEDTAVYYCATLGAGGGISSGGDAFDIWGQGTMVTVSS

SEQ ID NO: 10166 - protein, 18 aa, Artificial Sequence
  Synthetic
ATLGAGGGISSGGDAFDI

SEQ ID NO: 10167 - protein, 107 aa, Artificial Sequence; identical to SEQ ID NO: 1283
  Synthetic

SEQ ID NO: 10168 - protein, 9 aa, Artificial Sequence
  Synthetic
QQSYSTPRT

SEQ ID NO: 10169 - protein, 120 aa, Artificial Sequence
  Synthetic
QVQLQQWGAGLLKPSETLSLTCAVYGGSFSGYLWSWIRQPPGKGLEWIGEINHSGSTNYNPSLKSRVTISLDTSKNQFSLKLSSVTAADTAVYYCARDSGSSWVSYFDYWGQGTLVTVSS

SEQ ID NO: 10170 - protein, 14 aa, Artificial Sequence
  Synthetic
ARDSGSSWVSYFDY

SEQ ID NO: 10171 - protein, 110 aa, Artificial Sequence
  Synthetic
QFVLTQPPSVSAAPGQKVTISCSGSSSNIGNNYVSWYQQLPGTAPKLLIYDNNKRPSGIPDRFSGSKSGTSATLGITGLQTGDEADYYCGTWDSSLSAVVFGGGTQLTVL

SEQ ID NO: 10172 - protein, 11 aa, Artificial Sequence
  Synthetic
GTWDSSLSAVV

SEQ ID NO: 10173 - protein, 122 aa, Artificial Sequence
  Synthetic
EVQLVESGGVVVQPGGSLRLSCAASGFTFDDYAMHWVRQTPGKGLEWVSLITWDGGSTYYADSVKGRFTISRDNSKNSLYLQMNSLRAEDTALYYCAKGRFGELFWLGFDPWGQGTLVTVSS

SEQ ID NO: 10174 - protein, 15 aa, Artificial Sequence
  Synthetic
AKGRFGELFWLGFDP

SEQ ID NO: 10175 - protein, 111 aa, Artificial Sequence
  Synthetic
QSVLTQEPSLTVSPGGTVTLTCGSSTGAVTSGHYPYWFQQKPGQAPRTLIYDTNNKQSWTPARFSGSLLGGKAALTLSGAQPEDEADYYCLLSYSGARPGVFGGGTKLTVL

SEQ ID NO: 10176 - protein, 11 aa, Artificial Sequence
  Synthetic
LLSYSGARPGV

SEQ ID NO: 10177 - protein, 125 aa, Artificial Sequence
  Synthetic
QVQLVESGGGVVQPGKSLRLSCAASGFTLSTYGMHWVRQAPGKGLEWVALISYDGSNKYYADSVKGRFTISRDNSKNTLYLQMNSLRAEDTAVYYCAKDLLDYGDYPRVWGMDVWGQGTTVTVSS

SEQ ID NO: 10178 - protein, 18 aa, Artificial Sequence
  Synthetic
AKDLLDYGDYPRVWGMDV

SEQ ID NO: 10179 - protein, 110 aa, Artificial Sequence
  Synthetic
QSVLTQPPSASGTPGQRVTISCSGSSSNIGSNTVNWYQQLPGTAPKLLIFSNNRRPSGVPDRFSGSKSGTSASLAISGLQSEDEADYYCAAWDASLNGVVFGGGTKLTVL

SEQ ID NO: 10180 - protein, 11 aa, Artificial Sequence
  Synthetic
AAWDASLNGVV

SEQ ID NO: 10181 - protein, 126 aa, Artificial Sequence
  Synthetic
QVQLVQSGAEVKKPGSSVKVSCKASGGTFSSHAINWVRQAPGQGLEWMGGIIPIFGTANYAQKFQGRVTITADESTSTAYMELSSLRSEDTAVYYCARVDRAYGSGSYFGGGFDYWGQGTLVIVSS

SEQ ID NO: 10182 - protein, 19 aa, Artificial Sequence
  Synthetic
ARVDRAYGSGSYFGGGFDY

SEQ ID NO: 10183 - protein, 110 aa, Artificial Sequence
  Synthetic
QFVLTQPPSVSAAPGQKVSISCSGSSSNIGINYVSWYQQFPGTAPKLLIYENNKRPSGIPDRFSGSTSGTSATLGITGLQTGDEADYYCGTWDTSLSAGVFGGGTKLTVL

SEQ ID NO: 10184 - protein, 11 aa, Artificial Sequence
  Synthetic
GTWDTSLSAGV

SEQ ID NO: 10185 - protein, 126 aa, Artificial Sequence
  Synthetic
EVQLVESGGGLVQPGGSLRLSCAASGFTFSSYWMSWVRQAPGKGLEWVANIKQDGSVKYYVDSVKGRFTISRDNAKNSLYLQMNSLRAEDTAVYYCARETYYYDSSSYGVNWFDPWGQGTLVTVSS

SEQ ID NO: 10186 - protein, 19 aa, Artificial Sequence
  Synthetic
ARETYYYDSSSYGVNWFDP

SEQ ID NO: 10187 - protein, 111 aa, Artificial Sequence; identical to SEQ ID NO: 1907
  Synthetic

SEQ ID NO: 10188 - protein, 11 aa, Artificial Sequence
  Synthetic
QSYDSSLSGVV

SEQ ID NO: 10189 - protein, 128 aa, Artificial Sequence
  Synthetic
EVQLVESGGGVIRPGGSLRLSCAASGFNFDDHGMSWVRQAPGKGLEWVSGIDWNGGNTYYADSVKGRFTISRDNAKNSLYLQMNSLRAEDTALYYCAREKAAAGSGVFYYYYFGMDVWGQGTTVTVSS

SEQ ID NO: 10190 - protein, 21 aa, Artificial Sequence
  Synthetic
AREKAAAGSGVFYYYYFGMDV

SEQ ID NO: 10191 - protein, 108 aa, Artificial Sequence
  Synthetic
DIQMTQSPSSLSASVGDRVTITCQASQDISNYLNWYQQKPGKAPKLLIYDASNLETGVPSRFSGSGSGTDFTFTISSLQPEDIATYYCQQYDNLPSYTFGQGTKLEIK

SEQ ID NO: 10192 - protein, 10 aa, Artificial Sequence
  Synthetic
QQYDNLPSYT

SEQ ID NO: 10193 - protein, 116 aa, Artificial Sequence
  Synthetic
EVQLVESGGGLVQPGGSLRLSCAASGITVSRNYMTWVRQAPGKGLEWVSVIYSGGSTFYADSVKGRFTISRDNSKNTLYLQMNSLRAEDTAVYYCAREVFGYFDCWGQGTLVTVSS

SEQ ID NO: 10194 - protein, 10 aa, Artificial Sequence
  Synthetic
AREVFGYFDC

SEQ ID NO: 10195 - protein, 107 aa, Artificial Sequence
  Synthetic
DIQLTQSPSFLSASVGDRVTITCRASQGISSYLAWYQQKPGKAPKLLIYTASTLQSGVPSRFSGSGSGTEFTLTISSLQPEDFATYYCQQLNSYPPAFGQGTRLEIK

SEQ ID NO: 10196 - protein, 9 aa, Artificial Sequence
  Synthetic
QQLNSYPPA

SEQ ID NO: 10197 - protein, 122 aa, Artificial Sequence
  Synthetic
QVQLQESGPGLVKPSETLSLTCSVSGGSISSYYWSWIRQPPGKGLEWIGYIYYTGSTNYNPSLKSRVTISVDTSKNQFSLKLSSVTAADTAVYYCASYYYDSSGYHYGMDVWGQGTMVTVSS

SEQ ID NO: 10198 - protein, 16 aa, Artificial Sequence
  Synthetic
ASYYYDSSGYHYGMDV

SEQ ID NO: 10199 - protein, 107 aa, Artificial Sequence
  Synthetic
DIQMTQSPSSVSASVGDRVTIPCRASQGISSWLAWYQQKPGKAPKLLIYATSNLQSGVPSRFSGSGSGTDFTLTISSLQPEDFATYYCQQANSFPLTFGGGTKVELK

SEQ ID NO: 10200 - protein, 9 aa, Artificial Sequence
  Synthetic
QQANSFPLT

SEQ ID NO: 10201 - protein, 121 aa, Artificial Sequence
  Synthetic
EVQLVESGGGLVQPGGSLRLSCAASGFTVSSNYMSWVRQAPGKGLEWVSAIYSGGSTYYADSVKGRFTISRDNSKNTLYLQMNSLRAEDTAVYYCARVAGYSGYDGSFDYWGQGTLVTVSS

SEQ ID NO: 10202 - protein, 15 aa, Artificial Sequence
  Synthetic
ARVAGYSGYDGSFDY

SEQ ID NO: 10203 - protein, 110 aa, Artificial Sequence
  Synthetic
QSALTQPASVSGSPGQSITISCTGTSSDVGSYNLVSWYQQHPGKAPKLMIYEVIKRPSGVSNRFSGSKSGNTASLTISGLQAEDEADYYCCSYAGSSTWVFGRGTKLTVL

SEQ ID NO: 10204 - protein, 10 aa, Artificial Sequence
  Synthetic
CSYAGSSTWV

SEQ ID NO: 10205 - protein, 129 aa, Artificial Sequence
  Synthetic
EVQLVESGGGLVQPGGSLRLSCAASGFTFSSYDMHWVRQATGKGLEWVSTIGTAGDTYYPGSVKGRFTISRENAKNSLYLQMNSLRAGDTAVYYCARATDYYHDSGGLLRESNWYFDLWGRGTLVTVSS

SEQ ID NO: 10206 - protein, 23 aa, Artificial Sequence
  Synthetic
ARATDYYHDSGGLLRESNWYFDL

SEQ ID NO: 10207 - protein, 108 aa, Artificial Sequence
  Synthetic
DIQMTQSPSSLSASVGDRVTITCRASQGIRNSLAWYQQKPGKAPKLLLYAASRLESGVPSRFSGSGSGTDYTLTISSLQPEDFATYYCQQYYSSPPITFGQGTRLEIK

SEQ ID NO: 10208 - protein, 10 aa, Artificial Sequence
  Synthetic
QQYYSSPPIT

SEQ ID NO: 10209 - protein, 125 aa, Artificial Sequence
  Synthetic
QVQLVQSGAEVKTPGSSVKVSCKASGGTFSSYTISWVRQAPGQGLEWMGRIIPILGIANYAQKFQGRVTITADKSTNTAYMELSSLRSEDTAVYYCAREPTVTTPQRPSDAFDIWGQGTMVTVSS

SEQ ID NO: 10210 - protein, 18 aa, Artificial Sequence
  Synthetic
AREPTVTTPQRPSDAFDI

SEQ ID NO: 10211 - protein, 108 aa, Artificial Sequence
  Synthetic
DIQMTQSPSSLSASVGDRVTITCRASQSISSYLNWYQQKPGKAPNLLIYVASSLQSGVPSRFSGSGSGTDFTLTISSLQPEDFATYYCQQTYSTLMYTFGQGTKLEIK

SEQ ID NO: 10212 - protein, 10 aa, Artificial Sequence
  Synthetic
QQTYSTLMYT

SEQ ID NO: 10213 - protein, 119 aa, Artificial Sequence
  Synthetic
QVQLQESGPGLVKPSGTLSLTCAVSGGSISSFNWWSWVRQPPGKGLEWIGEIYHSGNTNYNPSLKSRVTISIDKSNNHFSLRLYSVTAADTAVYYCARGDGGNFYFDYWGQGTLVTVSS

SEQ ID NO: 10214 - protein, 12 aa, Artificial Sequence
  Synthetic
ARGDGGNFYFDY

SEQ ID NO: 10215 - protein, 110 aa, Artificial Sequence
  Synthetic
QFVLTQPASVSGSPGQSITISCTGTSSDVGGYNYVSWYQQHPGKAPKLMIYDVSHRPSGVSNRFSGSKSGNTASLTISGLQAADEADYYCSSYTSSSTPSFGTGTKVTVL

SEQ ID NO: 10216 - protein, 10 aa, Artificial Sequence
  Synthetic
SSYTSSSTPS

SEQ ID NO: 10217 - protein, 127 aa, Artificial Sequence
  Synthetic
QVQLVESGGGVVQPGRSLRLSCAASEFTFSNYAMYWVRQAPGKGLEWVAVISSDGSNKYYADSVKGRFTISRDNSKNTLYLQMNSLRAEDTAVYYCARDPVYCSSTSCAPGDRFDPWGQGTLVTVSS

SEQ ID NO: 10218 - protein, 20 aa, Artificial Sequence
  Synthetic
ARDPVYCSSTSCAPGDRFDP

SEQ ID NO: 10219 - protein, 110 aa, Artificial Sequence
  Synthetic
SYVLTQPPSVSVAPGKTARITCGGNNIGSKSVHWYQLKPGQAPVLVIYYDSDRPSGIPERFSGSNSGNTATLTLSRVEAGDEADYYCQVWDSTGDHPGWVFGGGTKLTVL

SEQ ID NO: 10220 - protein, 13 aa, Artificial Sequence
  Synthetic
QVWDSTGDHPGWV

SEQ ID NO: 10221 - protein, 122 aa, Artificial Sequence
  Synthetic
QVQLQESGPGLVKPSETLSLTCTVSGGSISSYYWSWIRQPPGKGLEWIGYIDYSGSTNYNPSLKSRVTISVDTSKNQFSLKLSSVTAADTAVYYCARGLYSFGPYYYGMDVWGQGTTVTVSS

SEQ ID NO: 10222 - protein, 16 aa, Artificial Sequence
  Synthetic
ARGLYSFGPYYYGMDV

SEQ ID NO: 10223 - protein, 107 aa, Artificial Sequence
  Synthetic
DIQMTQSPSSLSASVGDRVTITCRASQSISSYLNWYQQKPGKAPKLLIYAASSLQSGVPSRFSGSGSGTDFTLTISSLQPEDFATYYCQQSYTTLITFGQGTRLEIK

SEQ ID NO: 10224 - protein, 9 aa, Artificial Sequence
  Synthetic
QQSYTTLIT

SEQ ID NO: 10225 - protein, 125 aa, Artificial Sequence
  Synthetic
QVQLVQSGAEVKKPGSSVKVSCKASGGTFSIYAISWVRQAPGQGLEWMGGIILIFDTPNYAQNFQGRVTITADKSTSTAYMELSSLRSEDTAVYYCARGYVPTMVRAPAYYFDYWGQGTLVTVSS

SEQ ID NO: 10226 - protein, 18 aa, Artificial Sequence
  Synthetic
ARGYVPTMVRAPAYYFDY

SEQ ID NO: 10227 - protein, 107 aa, Artificial Sequence
  Synthetic
EIVLTQSPATLSLSPGERATLSCRASQSVSSSLAWYQQKPDQAPRLLIYDASNRATGIPARFSGSGSGTDFTLTISSLEPEDFAVYYCQQRSNWPLTFGGGTKVEIK

SEQ ID NO: 10228 - protein, 9 aa, Artificial Sequence
  Synthetic
QQRSNWPLT

SEQ ID NO: 10229 - protein, 125 aa, Artificial Sequence
  Synthetic
QVQLVQSGAEVKKPGSSLKVSCKASGGTFSSYTISWVRQAPGQGLEWMGRIIPILGIANYAQKFQGRVTITADKSTSTAYMELSSLRSEDTAVYYCAREGYYDSSGLTVEYFQHWGQGTLVIVSS

SEQ ID NO: 10230 - protein, 18 aa, Artificial Sequence
  Synthetic
AREGYYDSSGLTVEYFQH

SEQ ID NO: 10231 - protein, 111 aa, Artificial Sequence
  Synthetic
QFVLTQPPSVSGAPGQRVTIACTGSNSNIGAGYDVHWYQQVPGTAPKLLIYGDSNRPSGVPDRFSGSKSGTSASLAITGLQAEDEADYYCQSYDSSLSDSVFGGGTKLTVL

SEQ ID NO: 10232 - protein, 11 aa, Artificial Sequence
  Synthetic
QSYDSSLSDSV

SEQ ID NO: 10233 - protein, 130 aa, Artificial Sequence
  Synthetic
QVQLVQSGAEVKKPGSSVKVSCKASGGTFSNYAINWVRQAPGQGLEWMGGIIPIFGTANYTQKFQGRVTITADKSTRTAYMEVSSLRSEDTAVYYCARETLHYDYVWGSYSPYYYGMDVWGQGTTVTVSS

SEQ ID NO: 10234 - protein, 23 aa, Artificial Sequence
  Synthetic
ARETLHYDYVWGSYSPYYYGMDV

SEQ ID NO: 10235 - protein, 106 aa, Artificial Sequence
  Synthetic
DIQLTQSPSFLSASVGDRVTITCRASQGISSYLAWYQQKPGKAPKLLIYAASTLQSGVPSRFSGSGSGTEFTLTISSLQPEDFATYYCQQLNSYLTFGGGTKVEIK

SEQ ID NO: 10236 - protein, 8 aa, Artificial Sequence
  Synthetic
QQLNSYLT

SEQ ID NO: 10237 - protein, 128 aa, Artificial Sequence
  Synthetic
EVQLVESGGGLVQPGRSLRLSCAASGFTFDDYAMHWVRQAPGKGLEWVSGISWNSGTIGYADSVKGRFTISRDNAKNSLYLQMNSLRAEDTALYYCAKDMSYCGGDCYRLRANGMDVWGQGTTVTVSS

SEQ ID NO: 10238 - protein, 21 aa, Artificial Sequence
  Synthetic
AKDMSYCGGDCYRLRANGMDV

SEQ ID NO: 10239 - protein, 110 aa, Artificial Sequence
  Synthetic
QSALTQPASVSGSPGQSITISCTGTSSDVGGYNYVSWYQQHPGKAPKLMIYDVSNRPSGVSNRFSGSKSGNTASLTISGLQAEDEADYYCSSYTSSSSYVFGTGTKVTVL

SEQ ID NO: 10240 - protein, 10 aa, Artificial Sequence
  Synthetic
SSYTSSSSYV

SEQ ID NO: 10241 - protein, 123 aa, Artificial Sequence
  Synthetic
QVQLVESGGGVVQPGRSLRLSCAASGFTFNNYGMYWVRQAPGKGLEWVAVISYDGSNKYYADSVKGRFTISRDNSKNTLYLQMNSLRAADTAVYYCAKSGYSYAYPVYYFDYWGQGTLVTVSS

SEQ ID NO: 10242 - protein, 16 aa, Artificial Sequence
  Synthetic
AKSGYSYAYPVYYFDY

SEQ ID NO: 10243 - protein, 112 aa, Artificial Sequence
  Synthetic
NFMLTQPHSVSESPGKTVTISCTRSSGSIASNYVQWYQQRPGSSPTTVIYEDNQRPSGVPDRFSGSIDSSSNSASLTISGLKTEDEADYYCQSYDSSYGDVVFGGGTKLTVL

SEQ ID NO: 10244 - protein, 11 aa, Artificial Sequence
  Synthetic
QSYDSSYGDVV

SEQ ID NO: 10245 - protein, 122 aa, Artificial Sequence
  Synthetic
QVQLVQSGAEVKKPGASVKVSCKASGYTFTDYYMHWVRQAPGQGLEWMAWISPNSGGTNYTQKFQGRVTMNRDTSISTVYMELNRLRSDDTAVYYCARDLNQYVVMAPGDYWGQGTLVTVSS

SEQ ID NO: 10246 - protein, 15 aa, Artificial Sequence
  Synthetic
ARDLNQYVVMAPGDY

SEQ ID NO: 10247 - protein, 110 aa, Artificial Sequence
  Synthetic
QFVLTQPPSASGSPGQSVTISCTGTSSDVGGYNYVSWYQQHPGKAPKLMIYEVSKRPSGVPDRFSGSKSGNTASLTVSGLQAEDEADYYCTSYAGNNNLVFGTGTKVTVL

SEQ ID NO: 10248 - protein, 10 aa, Artificial Sequence
  Synthetic
TSYAGNNNLV

SEQ ID NO: 10249 - protein, 122 aa, Artificial Sequence
  Synthetic
QVQLQESGPGLVKPSETLSLTCTVSGGSISSYYWSWIRQPPGKGLEWIGYIYYSGSTNYNPSLKSRVTISLDTSKNQFSLKLSSVTAADTAVYYCAGDYYDSSGYRYGMDVWGQGTTVTVSS

SEQ ID NO: 10250 - protein, 16 aa, Artificial Sequence
  Synthetic
AGDYYDSSGYRYGMDV

SEQ ID NO: 10251 - protein, 107 aa, Artificial Sequence
  Synthetic
DIQMTQSPSSVSASVGDRVTITCRASQGISGWLAWYQQKPGKAPRLLIYAASTLQSGVPSRFSGSGSGTDFTLTISSLQPEDFATYYCQQANSFPLTFGQGTKVEIK

SEQ ID NO: 10252 - protein, 9 aa, Artificial Sequence
  Synthetic
QQANSFPLT

SEQ ID NO: 10253 - protein, 127 aa, Artificial Sequence
  Synthetic
QLQLQESGSGLVKPSQTLSLTCAVSGGSISSGGSSWSWIRQPPGKGLEWIGYIYHGGSTYYNPSLKSRVTISVDRSKNQFSLKLTSVTAADTAVYYCARTYFYDSSGNYYQYYFDYWGQGTLVTVSS

SEQ ID NO: 10254 - protein, 19 aa, Artificial Sequence
  Synthetic
ARTYFYDSSGNYYQYYFDY

SEQ ID NO: 10255 - protein, 108 aa, Artificial Sequence
  Synthetic
EIVLTQSPGTLSLSPGERATLSCRASQSVSSGNLAWYQQKPGQAPRLLIYGASNRATGIPDRFSGSGSGTDFTLTITRLEPEDFAVYYCQQYAGSPFTFGPGTKVDIK

SEQ ID NO: 10256 - protein, 9 aa, Artificial Sequence
  Synthetic
QQYAGSPFT

SEQ ID NO: 10257 - protein, 117 aa, Artificial Sequence
  Synthetic
EVQLVESGGGLIQPGGSLRLSCVASGITVSANYMNWIRQAPGKGLEWVSVLYSGGSTFYADSVKGRFTISRDNSKNTLYLQMNSLRVEDTAVYYCARDLGNSEFDYWGQGTLVTVSS

SEQ ID NO: 10258 - protein, 11 aa, Artificial Sequence
  Synthetic
ARDLGNSEFDY

SEQ ID NO: 10259 - protein, 108 aa, Artificial Sequence
  Synthetic
DIQLTQSPVSLSASVGDRVTITCRASQGISTYLAWYQQKPGKAPRLLIYAASTLQSGVPSRFSGSGSGTEFTLTISSLQPEDFATYYCQQLNSYPPITFGQGTRLEIK

SEQ ID NO: 10260 - protein, 10 aa, Artificial Sequence
  Synthetic
QQLNSYPPIT

SEQ ID NO: 10261 - protein, 130 aa, Artificial Sequence
  Synthetic
QVQLVQSGAEVKKPGSSVKVSCKASGGTFSNYGFSWVRQAPGQGLEWMGRIIPLFGPASYAQSFQGRVTITADKSTTTAYMEVSSLRGDDTAVYYCARETLHYDSVWGSYSPHYYGMDVWGQGTTVTVSS

SEQ ID NO: 10262 - protein, 23 aa, Artificial Sequence
  Synthetic
ARETLHYDSVWGSYSPHYYGMDV

SEQ ID NO: 10263 - protein, 106 aa, Artificial Sequence
  Synthetic
DIQLTQSPSFLSASVGDRVTITCRASQGISNYLAWYQQKPGKAPNLLIYAASTLQGGVPSRFSGSGSGTEFTLTISGLQPEDFATYYCQQLNSFLTFGGGTKVEIK

SEQ ID NO: 10264 - protein, 8 aa, Artificial Sequence
  Synthetic
QQLNSFLT

SEQ ID NO: 10265 - protein, 124 aa, Artificial Sequence
  Synthetic
EVQLVESGGGLVQPGRSLRLSCAASGFTFDDYAMHWVRQAPGKGLEWVSGVTWNSGIIGYADSVKGRFFISRDNAKNSLYVQMNSLRPEDTALYYCVKDIYRIATTDDYAMDVWGQGTTVTVSS

SEQ ID NO: 10266 - protein, 17 aa, Artificial Sequence
  Synthetic
VKDIYRIATTDDYAMDV

SEQ ID NO: 10267 - protein, 111 aa, Artificial Sequence
  Synthetic
QFVLTQPPSASGTPGQRVTISCSGSSSNIGSNYVYWYQQLPGTAPKLLIYRNNQRPSGVPDRFSGSKSGTSASLAISGLRSEDEADYYCAAWDDSLSGREVFGGGTKLTVL

SEQ ID NO: 10268 - protein, 12 aa, Artificial Sequence
  Synthetic
AAWDDSLSGREV

SEQ ID NO: 10269 - protein, 127 aa, Artificial Sequence
  Synthetic
QVQLVQSGAEVKKPGASVKVSCKTSGHTYSGYYMHWVRQAPGQGLEWMGWISPNSGGTNYAQKFQGRVTMTSDTSISLVYMELRRLSSDDTAVYYCATGTYYYDSSGYSFNDAFDIWGQGTTVTVSS

SEQ ID NO: 10270 - protein, 20 aa, Artificial Sequence
  Synthetic
ATGTYYYDSSGYSFNDAFDI

SEQ ID NO: 10271 - protein, 108 aa, Artificial Sequence
  Synthetic
EIVLTQSPGTLSLSPGERATLSCRASQSVSSTYFGWYQQKPGQAPRLLIYSASSRATGIPDRFSGNGSGTDFTLTISRLEPEDFAVYYCQQYGGSPVTFGQGTKVEIK

SEQ ID NO: 10272 - protein, 9 aa, Artificial Sequence
  Synthetic
QQYGGSPVT

SEQ ID NO: 10273 - protein, 127 aa, Artificial Sequence
  Synthetic
QVQLVESGGGVVQPGRSLRLSCVASGFRFTTYAMHWVRQAPGKGLEWVAVLWFDGINNYYLDSVKGRFTISRAKANNTVYLQMDSLRAEDTAVYYCAREQAPDPSIMGATIDAFDLWGQGTMVTVSS

SEQ ID NO: 10274 - protein, 20 aa, Artificial Sequence
  Synthetic
AREQAPDPSIMGATIDAFDL

SEQ ID NO: 10275 - protein, 108 aa, Artificial Sequence
  Synthetic
DIQMTQSPVSLSASVGDRVTITCRASQSISSYLNWYQQKPGKAPKLLIYAASSLQSGVPSRFSGSGSGTDFTLTISSLQPEDFATYYCQQSYSTLLITFGQGTRLEIK

SEQ ID NO: 10276 - protein, 10 aa, Artificial Sequence
  Synthetic
QQSYSTLLIT

SEQ ID NO: 10277 - protein, 123 aa, Artificial Sequence
  Synthetic
EVQLVESGGGLVKPGGSLRLSCAASGFTFTNAWMNWVRQVPGKGLEWVGRIKSQIDGGTADYAAPVKDRFTISRDDSKNTLYLQMNSLKTEDTAVYYCTSVSEGDYYYGMDVWGQGTTVTVSS

SEQ ID NO: 10278 - protein, 14 aa, Artificial Sequence
  Synthetic
TSVSEGDYYYGMDV

SEQ ID NO: 10279 - protein, 109 aa, Artificial Sequence
  Synthetic
QFVLTQEPSLTVSPGGTVTLTCASSTGAVTSGHYPYWFQQKPGQAPKTLIYDIINRQSWTPARFSGSLLGGKAALTLSGAQPEDEAEYYCLLSYSGVRVFGGGTKLTVL

SEQ ID NO: 10280 - protein, 9 aa, Artificial Sequence
  Synthetic
LLSYSGVRV

SEQ ID NO: 10281 - protein, 119 aa, Artificial Sequence
  Synthetic
EVQLVQSGAEVKKPGESLKISCKASGYSFISWWIGWVRQVPGKGLEWMGVIYPGDSDTRYSPSFQGQVTISADKSISTAYLQWNSLKASDTAMYYCARRDGSGMNYDYWGQGTLVTVSS

SEQ ID NO: 10282 - protein, 12 aa, Artificial Sequence
  Synthetic
ARRDGSGMNYDY

SEQ ID NO: 10283 - protein, 111 aa, Artificial Sequence
  Synthetic
QFVLTQPPSASGTPGQRVTISCSGSSSNIGSNTVNWYQQLPGTAPKLLIYLNNQRPSGVPDRFSASKSGTSASLAINGLQSEDEADYYCAAWDDSLNGPEVFGGGTKLTVL

SEQ ID NO: 10284 - protein, 12 aa, Artificial Sequence
  Synthetic
AAWDDSLNGPEV

SEQ ID NO: 10285 - protein, 123 aa, Artificial Sequence
  Synthetic
EVQLVESGGGLVQPGGSLRLSCAASDFSLSTYNMNWVRQAPGKGLEWISYISTSGTTIFYADSVKGRFTISRDNAKNSLYLQMTSLRAEDTAMYYCARGRGLRSYYYHGLDVWGQGTTVTVSS

SEQ ID NO: 10286 - protein, 16 aa, Artificial Sequence
  Synthetic
ARGRGLRSYYYHGLDV

SEQ ID NO: 10287 - protein, 107 aa, Artificial Sequence
  Synthetic
DIQMTQSPSSLSASVGDRVTITCRASQSINNYLNWYQQKPGKAPKLLIFAASTLQSGVPSRFSGSGSETDFTLSISSLQPEDFATYYCQQSYSTPCTFGQGTQLEIK

SEQ ID NO: 10288 - protein, 9 aa, Artificial Sequence
  Synthetic
QQSYSTPCT

SEQ ID NO: 10289 - protein, 124 aa, Artificial Sequence
  Synthetic
EVQLVESGGGLVQPGGSLRLSCAASGFTFSSDDMHWVRQPTGKGLEWVSVIGSSGDTYYADSVKGRFTISRDNAKNSLYLQMNSLRVGDTAVYYCTRGVAVAASRKYYYNMDVWGQGTMVTVSS

SEQ ID NO: 10290 - protein, 18 aa, Artificial Sequence
  Synthetic
TRGVAVAASRKYYYNMDV

SEQ ID NO: 10291 - protein, 108 aa, Artificial Sequence
  Synthetic
DIQMTQSPSSLSASVGDRVTITCRASQSISTYLNWYQHRPGKPPKLLIYAASTLQSGVPSRFSGSGSGTDFTLTISSLQAEDFATYYCQQSYSAPSWAFGQGTKLEIK

SEQ ID NO: 10292 - protein, 10 aa, Artificial Sequence
  Synthetic
QQSYSAPSWA

SEQ ID NO: 10293 - protein, 128 aa, Artificial Sequence
  Synthetic
EVQLVESGGGLVQPGGSVRLSCAASGFTFSNYDMHWVRQVTGKGLEWVSAIGTSGDTYYLDSVKGRFTISRENAKNTLYLQMNSLTAGDTAVYYCSKTLYYYDSSGPLGHYSYGLDIWGQGTTVTVSS

SEQ ID NO: 10294 - protein, 22 aa, Artificial Sequence
  Synthetic
SKTLYYYDSSGPLGHYSYGLDI

SEQ ID NO: 10295 - protein, 107 aa, Artificial Sequence
  Synthetic
EIVMTQSPATLSVSPGERATLSCRASQSVRSNLAWYQQKPGQAPRLLIYSTSTRATGVPARFSGSGSGTEFTLTISSLQSEDFAVYYCQQYHNWPPITFGQGTRLEN

SEQ ID NO: 10296 - protein, 10 aa, Artificial Sequence
  Synthetic
QQYHNWPPIT

SEQ ID NO: 10297 - protein, 124 aa, Artificial Sequence
  Synthetic
QLQLQESGPGLVKPSETLSLTCTVSDGSIRSSSYYWVWIRQPPGKGLEWIGSVYYTGSTYNNPSLKSRVTMSVDTSKNQLSLRLSSVTAADTAVYYCARDLPLLAAGIGGFDFWGQGILVTVSS

SEQ ID NO: 10298 - protein, 16 aa, Artificial Sequence
  Synthetic
ARDLPLLAAGIGGFDF

SEQ ID NO: 10299 - protein, 107 aa, Artificial Sequence
  Synthetic
DIQMTQSPSSLSASAGDRVTITCQASQDIRNRLNWYQQKPGKAPNLLIYDASNLEVGVPSRFSGGGSGTDFTFTISSLQPEDIATYYCQQYVNVPLTFGGGTKVEIK

SEQ ID NO: 10300 - protein, 9 aa, Artificial Sequence
  Synthetic
QQYVNVPLT

SEQ ID NO: 10301 - protein, 119 aa, Artificial Sequence
  Synthetic
QVQLVQSGPEVKKPGASVKVSCKTSGYNFTNYGISWVRQAPGQGLEWMGWISPYNGNRNYAQNIRARVTMTTDTSTMTAYMELRSLRSDDTAVYYCVRDGELLNWFDPWGQGTLVIVSS

SEQ ID NO: 10302 - protein, 12 aa, Artificial Sequence
  Synthetic
VRDGELLNWFDP

SEQ ID NO: 10303 - protein, 110 aa, Artificial Sequence
  Synthetic
QFVLTQPASVSGSPGQSITISCTGTSSDVGSYNLVSWYQQRPDKAPKLIIYKVTKRPSGVSTRFSGSKSGNTASLTISGLQAEDEADYYCCSYGGSSTWVFGGGTKLTVL

SEQ ID NO: 10304 - protein, 10 aa, Artificial Sequence
  Synthetic
CSYGGSSTWV

SEQ ID NO: 10305 - protein, 129 aa, Artificial Sequence
  Synthetic
QVQLVQSGAEVKKPGSSVKVSCKASGGTFSIFAINWVRQAPGQGLEWMGGIIPIFGAANYAQKFQGRLTITADKSTSTSYMELSSLRSEDTAVYYCAREEGVHDDVWGSFNYYYAMDVWGQGTTVIVSS

SEQ ID NO: 10306 - protein, 22 aa, Artificial Sequence
  Synthetic
AREEGVHDDVWGSFNYYYAMDV

SEQ ID NO: 10307 - protein, 110 aa, Artificial Sequence
  Synthetic
QFVLTQPPSASGSPGQSVTISCTGTSSDVGGYNYVSWYQQHPGKAPKLMIYEVNKRPSGVPDRFSGSKSGNTASLTVSGLQAEDEADYYCSSSVGTNNFVVFGGGTILTV

SEQ ID NO: 10308 - protein, 11 aa, Artificial Sequence
  Synthetic
SSSVGTNNFVV

SEQ ID NO: 10309 - protein, 119 aa, Artificial Sequence
  Synthetic
QVQLVESGGGLVKPGGSLRLSCAASGFTFSDYYMSWIRQAPGKGLEWVSYISSSSSYTNYADSVKGRFTISRDNAKNSLYLQMNSLRVEDTAVYYCARKRWIQGDFDFWGQGTLVTVSS

SEQ ID NO: 10310 - protein, 12 aa, Artificial Sequence
  Synthetic
ARKRWIQGDFDF

SEQ ID NO: 10311 - protein, 111 aa, Artificial Sequence
  Synthetic
NFVLTQPHSVSESPGKTVTISCTRSSGSIANNYVQWYQQRPGSSPTTVIYEDNQRPSAVPDRFSGSIDSSSNSASLTISGLKTEDEADYYCQSYDISNHGVFGGGTKLTVL

SEQ ID NO: 10312 - protein, 10 aa, Artificial Sequence
  Synthetic
QSYDISNHGV

SEQ ID NO: 10313 - protein, 118 aa, Artificial Sequence
  Synthetic
EVQLVETGGGLIQPGGSLRLSCAASGITVNRNYMNWVRQAPGKGLEWVSVMYSGGSTFYADSVKGRFNISRDNSKNTLYLQMNSLRAVDTAVYYCARDLGPKGGMDVWGQGTTVTVSS

SEQ ID NO: 10314 - protein, 12 aa, Artificial Sequence
  Synthetic
ARDLGPKGGMDV

SEQ ID NO: 10315 - protein, 108 aa, Artificial Sequence
  Synthetic
EIVLTQSPGTLSLSPGERATLSCRASQSVSSSYLAWYQQKPGQAPRLLIYGASSRATGIPDRFSGSASGTDFTLTISRLEPEDFAVYYCQQYGSSPGTFGGGTKVEIK

SEQ ID NO: 10316 - protein, 9 aa, Artificial Sequence
  Synthetic
QQYGSSPGT

SEQ ID NO: 10317 - protein, 126 aa, Artificial Sequence
  Synthetic
EVQLLESGGGLVQPGGSLRLSCAASGITFSNFAMSWVRQAPGKGLEWVSAISGSGGSTYYADSVKGRFTISRDNSKNTLYLQMNSLRAEDTAIYYCAKLAEYDILTGYYILYFDYWGQGTLVTVSS

SEQ ID NO: 10318 - protein, 19 aa, Artificial Sequence
  Synthetic
AKLAEYDILTGYYILYFDY

SEQ ID NO: 10319 - protein, 109 aa, Artificial Sequence
  Synthetic
QFVLTQPRSVSGSPGQSVTISCTGTSSDVGGYNYVSWYQQYPGKAPKLMISDVSKRPSGVPDRFSGSKSGNTASLTISGLQAEDDADYYCCSYAGTYTYVFGTGTKVTV

SEQ ID NO: 10320 - protein, 10 aa, Artificial Sequence
  Synthetic
CSYAGTYTYV

SEQ ID NO: 10321 - protein, 125 aa, Artificial Sequence
  Synthetic
QVQLVQSGAEVKKPGSSVKVSCKTSGGTFINWVRQAPGQGLEWLGGISPMFATAKYAEKFQGRVTITADNSTSASYMELNSLTSEDTAVYYCARDHIASYYDRSGHYHYYGMDVWGQGTTVTVSS

SEQ ID NO: 10322 - protein, 22 aa, Artificial Sequence
  Synthetic
ARDHIASYYDRSGHYHYYGMDV

SEQ ID NO: 10323 - protein, 111 aa, Artificial Sequence
  Synthetic
QFVLTQPPSVSAAPGQRVTISCSGSSSNIGNNYVSWYQQLPGTAPKLLIYDNNQRPSGIPDRFSGSKSGTSATLGITGLQTGDEADYYCGTWDDSLSAARVFGGGTKLTVL

SEQ ID NO: 10324 - protein, 12 aa, Artificial Sequence
  Synthetic
GTWDDSLSAARV

SEQ ID NO: 10325 - protein, 121 aa, Artificial Sequence
  Synthetic
QVQLQESGPGLVKPSQTLSLTCTVSGDSISRSDYYWSWIRQPPGKGLEWIGYIDYSGRTYNNPSLKSRFIISIDTSKNQFSLNLSSVTAADTAVYYCAKICGGDCYGSFDIWGQGTLVSVS

SEQ ID NO: 10326 - protein, 14 aa, Artificial Sequence
  Synthetic
AKICGGDCYGSFDI

SEQ ID NO: 10327 - protein, 112 aa, Artificial Sequence
  Synthetic
DIVMTQTPLSSPVTLGQPASISCRSSHSLVHSDGNTYLSWLQQRPGQPPRLLIYEVSKRFPGVPDRFSGSGAGTVFTLKISRVEAEDVGLYYCTQAAQLPWTFGQGTKVEIK

SEQ ID NO: 10328 - protein, 9 aa, Artificial Sequence
  Synthetic
TQAAQLPWT

SEQ ID NO: 10329 - protein, 122 aa, Artificial Sequence
  Synthetic
EVQLVESGGGLVRPGRSLRLSCAASGFTFGNFAMHWVRQAPGKGLEWVSGISWDSGTIGYADSVKGRFTISRDNAKNSLYLQMNSLRAEDTAFYYCAKDILGGYYYFTMHVWGQGTTVTVSS

SEQ ID NO: 10330 - protein, 15 aa, Artificial Sequence
  Synthetic
AKDILGGYYYFTMHV

SEQ ID NO: 10331 - protein, 110 aa, Artificial Sequence
  Synthetic
QFVLTQPASVSGSPGQSITISCTGTSSDVGGYNYVSWYQQHPGKAPKLMIFDVSNRPSGVSNRFSGSKSGNTASLTISGLQAEDEADYYCTSYTSSSTLDVFGTGTKVTV

SEQ ID NO: 10332 - protein, 11 aa, Artificial Sequence
  Synthetic
TSYTSSSTLDV

SEQ ID NO: 10333 - protein, 126 aa, Artificial Sequence
  Synthetic
  misc_feature (49)..(49): Xaa can be any naturally occurring amino acid
QVQLVQSGAEVKKPGASVKVSCKTSGYTFTAYYVHWVRQAPGQGLEWMXWTNPNSDDTNYAQKFQGRLTMTRDTSINTAYMELSSLRFDDTAVYYCARDSRQGGLRWTVYNYFDPWGQGTPVTVSS

SEQ ID NO: 10334 - protein, 19 aa, Artificial Sequence
  Synthetic
ARDSRQGGLRWTVYNYFDP

SEQ ID NO: 10335 - protein, 107 aa, Artificial Sequence
  Synthetic
DIQLTQSPSFLSASVGDRVTITCRASQGISSSLAWYQQKPGKPPKLLIYAASTLQSGVPSRFSGSGSGTEFTLTISSLQPVDFATYYCQQLNSYPNIFGQGTKLEIK

SEQ ID NO: 10336 - protein, 9 aa, Artificial Sequence
  Synthetic
QQLNSYPNI

SEQ ID NO: 10337 - protein, 128 aa, Artificial Sequence
  Synthetic
EVQLVESGGGLVQPGGSLRLSCAASGFTFSNYDMHWVRQVTGKGLEWVSAIGTAGDTYYLGSVKGRFTTSRENAKSSFFLQMNSLRAGDTAVYYCARGFHPYTSGWSGALGEYFFDYWGQGTLVTVSS

SEQ ID NO: 10338 - protein, 22 aa, Artificial Sequence
  Synthetic
ARGFHPYTSGWSGALGEYFFDY

SEQ ID NO: 10339 - protein, 108 aa, Artificial Sequence
  Synthetic
DIQMTQSPSSLSAYVGDRVTITCRTSQSIITYLNWYQQKPGKAPKLLIYAASNLQSGVPSRFSGSGSGTDFTLAITSLQPEDFATYYCQQTYSTPPWTFGQGTKVEIK

SEQ ID NO: 10340 - protein, 10 aa, Artificial Sequence
  Synthetic
QQTYSTPPWT

SEQ ID NO: 10341 - protein, 117 aa, Artificial Sequence
  Synthetic
EVQLVETGGGLIQPGGSLKLSCAASGLIVSSNYMTWVRQAPGKGLEWVSLIYSGGSTFYADSVKGRFTISRDNSKNTLYLHMNSLRAEDTAVYYCARDLSYYGVDVWGQGTTVTVSS

SEQ ID NO: 10342 - protein, 11 aa, Artificial Sequence
  Synthetic
ARDLSYYGVDV

SEQ ID NO: 10343 - protein, 108 aa, Artificial Sequence
  Synthetic
DIQLTQSPSFLSASVGERVTITCRASQGISSYLAWYQQKRGKAPKLLIYAASTLQSGVPSRFSGSGSGTEFILTISSLQPEDFATYYCQHLNSDPPITFGQGTRLEIK

SEQ ID NO: 10344 - protein, 10 aa, Artificial Sequence
  Synthetic
QHLNSDPPIT

SEQ ID NO: 10345 - protein, 122 aa, Artificial Sequence
  Synthetic
EVQLVESGGGLVQPGGSLRLSCAASGFTFSTYDMHWVRQATGKGLEWVSAIGTAGDTYYSDSVKGRFTISRENAKNSLYLQMNSLRAGDTAVYFCARVEYTSGYVYWYFDLWGRGTLVTVSS

SEQ ID NO: 10346 - protein, 16 aa, Artificial Sequence
  Synthetic
ARVEYTSGYVYWYFDL

SEQ ID NO: 10347 - protein, 108 aa, Artificial Sequence
  Synthetic
DIQMTQSPSSLSASLGDRVTITCRASQTISKYLNWYQQRPGKAPKLLIYAASTLQSGVPSRFSGSGSGTDFTLTISSLQPEDFATYYCQQSYSTPPWTFGQGTKVEIK

SEQ ID NO: 10348 - protein, 10 aa, Artificial Sequence
  Synthetic
QQSYSTPPWT

SEQ ID NO: 10349 - protein, 114 aa, Artificial Sequence
  Synthetic
EVQLVESGGGSVQPGVSLKLSCAASGLTVSSNYMSWVRQAPGKGLEWVSLIYSGGSTFYADSVKGRFTISRDNSKNTMYLQMNSLRSEDTAIYYCARVVRDTIWGQGTLVTVSS

SEQ ID NO: 10350 - protein, 8 aa, Artificial Sequence
  Synthetic
ARVVRDTI

SEQ ID NO: 10351 - protein, 107 aa, Artificial Sequence
  Synthetic
DIQMTQSPSSLSASVGDRVTITCQASQDINKYLNWYQQKPGKAPKLLIHDASNLETGVPSRFSGSGSGTDFTFTISSLQPEDIATYYCQECDNLFGAFGPGTRVEIK

SEQ ID NO: 10352 - protein, 9 aa, Artificial Sequence
  Synthetic
QECDNLFGA

SEQ ID NO: 10353 - protein, 131 aa, Artificial Sequence
  Synthetic
EVQLVQSGAAVKKPGESLRISCKEFGNNFPTYWIAWVRQKPGKGLEWMGIIYPGDSDTRYNPSFQGQVTLSADKSNSTVYLQWSSLKASDTAMYFCARHKGEERYCSGGSCFWGYYGMDVWGQGTTVTVSS

SEQ ID NO: 10354 - protein, 24 aa, Artificial Sequence
  Synthetic
ARHKGEERYCSGGSCFWGYYGMDV

SEQ ID NO: 10355 - protein, 107 aa, Artificial Sequence
  Synthetic
DIQMTQSPSSLSASVGDRVTITCRASQSISNFLNWYQQKPGKAPKLLIYAASSFQSGVPSRFSGRGSGTDFTLTISSLQPEDFATYYCQQSFTTPQTFGQGTTVEIK

SEQ ID NO: 10356 - protein, 9 aa, Artificial Sequence
  Synthetic
QQSFTTPQT

SEQ ID NO: 10357 - protein, 128 aa, Artificial Sequence
  Synthetic
EVQLVESGGGLVQPGGSLRLSCAASGFTFSRYWMHWVRQAPGKGLVWVSRINSDGSSTSYVDSVKGRFTISRDNAKNTLYVQMKSLRAEDTAVYYCARVLYHYDRSGYQVGDDAFDIWGQGTMVTVSS

SEQ ID NO: 10358 - protein, 21 aa, Artificial Sequence
  Synthetic
ARVLYHYDRSGYQVGDDAFDI

SEQ ID NO: 10359 - protein, 110 aa, Artificial Sequence
  Synthetic
QSVLTQPPSVSGAPGQRVTISCTGSSSNIGAGYDVHWYQQLPGTAPKLLIYGNSNRPSGVPDRFSGSKFGTSASLAITGLQAEDEADYYCQSYDSSLSGVFGGGTKLTVL

SEQ ID NO: 10360 - protein, 10 aa, Artificial Sequence
  Synthetic
QSYDSSLSGV

SEQ ID NO: 10361 - protein, 121 aa, Artificial Sequence
  Synthetic
QVQLVESGGGVVQPGRSLRLSCAASGFSFSNYDMHWVRQAPGKGLEWMAVISNDGSIKYYADSMKGRFTISRDNSKNTLYLQMDSLRADDTAVYYCARDGLSLRVAYFEYWGQGTLVTVSS

SEQ ID NO: 10362 - protein, 14 aa, Artificial Sequence
  Synthetic
ARDGLSLRVAYFEY

SEQ ID NO: 10363 - protein, 108 aa, Artificial Sequence
  Synthetic
  misc_feature (9)..(10): Xaa can be any naturally occurring amino acid
DIQMTQSPXXLSASVGDRVTITCRASQSITSYLNWYQQKPGKAPNLLIYAASSLQSGVPSRFSGSGSGTDFTLTISSLQPEDFATYYCQQSFSTSMYTFGQGTKLEIK

SEQ ID NO: 10364 - protein, 10 aa, Artificial Sequence
  Synthetic
QQSFSTSMYT

SEQ ID NO: 10365 - protein, 121 aa, Artificial Sequence
  Synthetic
EVQLVESGGGLVKPGGSLRLSCAASGFTFNIYNMNWVRQAPGKGLEWVSSISGSNNYIYYSDSVKGRFTISRDNTKNSLYLQMNSLRADDTAVYYCAREGSGWDSEAFDIWGQGTRVTVSS

SEQ ID NO: 10366 - protein, 14 aa, Artificial Sequence
  Synthetic
AREGSGWDSEAFDI

SEQ ID NO: 10367 - protein, 110 aa, Artificial Sequence
  Synthetic
QFVLTQPRSVSGSPGQSVTISCTGTSSDVGGYNYVSWYQQHPGKAPKLMIYDVIKRPSGVPDRFSGSKSGNTASLTISGLQAEDEADYYCCSYAGSYNWVFGGGTKLTVL

SEQ ID NO: 10368 - protein, 10 aa, Artificial Sequence
  Synthetic
CSYAGSYNWV

SEQ ID NO: 10369 - protein, 121 aa, Artificial Sequence
  Synthetic
QVQLVQSGAEVKKPGASVKVSCKASGYTFTSYFLHWVRQAPGQGLEWMGIINPSGGATSYPQKFRGRVSMTRDTSTSTVYMELISLRSDDTAVYYCARGDSSNWYSSFDPWGQGTLVTVSS

SEQ ID NO: 10370 - protein, 14 aa, Artificial Sequence
  Synthetic
ARGDSSNWYSSFDP

SEQ ID NO: 10371 - protein, 113 aa, Artificial Sequence
  Synthetic
QFVLTQPPSVSGAPGQRVSISCTGSSSNIGAGYGVHWYRQLPGTAPKLLIFDNTNRPSGVPDRFSGSKSGTSASLAITGLQAEDEADYYCQSYDSNLSGSNYVFGTGTKVTVL

SEQ ID NO: 10372 - protein, 13 aa, Artificial Sequence
  Synthetic
QSYDSNLSGSNYV

SEQ ID NO: 10373 - protein, 121 aa, Artificial Sequence
  Synthetic
QLQLQESGPGLVKPSGTLSLTCTVSGASISTTYFYWGWIRQSPGKGLEWIGSIYYSGSTYYNPSLKSRVAMSVDTSKNQFSLELNSVTAADTALYYCARIGSGSYGIFDYWGQGTLVTVSS

SEQ ID NO: 10374 - protein, 13 aa, Artificial Sequence
  Synthetic
ARIGSGSYGIFDY

SEQ ID NO: 10375 - protein, 106 aa, Artificial Sequence
  Synthetic
  misc_feature (9)..(10): Xaa can be any naturally occurring amino acid
DIQMTQSPXXLSASVGDRVTITCQASQDINNYLNWYQQKPGKAPKLLIYDASNLETGVPSKFSGSGSGTDFTFTISSLQPEDLAIYYCQHYKNFPYTFGQGTKLEI

SEQ ID NO: 10376 - protein, 9 aa, Artificial Sequence
  Synthetic
QHYKNFPYT

SEQ ID NO: 10377 - protein, 120 aa, Artificial Sequence
  Synthetic
EVQLVESGGGLVKPGGSLRLSCAASGFTFTSYSMNWVRQAPGKGLEWVSSISDSSTFIYYADSVQGRFTISRDDAKNSLYLQMNSLRAEDTAVYYCARDKDWLVPVIDYWGQGTLVTVSS

SEQ ID NO: 10378 - protein, 13 aa, Artificial Sequence
  Synthetic
ARDKDWLVPVIDY

SEQ ID NO: 10379 - protein, 108 aa, Artificial Sequence
  Synthetic
DIQMTQSPSSLSASVGDRVTITCRASQSISSHLNWYHQKPGKAPKLLIYAASTLQSGVPSRFSGSGSGTDFTLTISSLQPEDFATYYCQQSYTTFSLTFGGGTTVEIK

SEQ ID NO: 10380 - protein, 10 aa, Artificial Sequence
  Synthetic
QQSYTTFSLT

SEQ ID NO: 10381 - protein, 128 aa, Artificial Sequence
  Synthetic
QLQLQESGPGLVKPSETLSLTCIVSGGSIISSSYYWGWIRQPPGKGLEWIGSIHYSGSTYYNPSLKSRVIISVDTSKNQFSLKLSSVTAADTAVYYCVREYLGIVVVPAATSGWFDPWGQGTLVTVSS

SEQ ID NO: 10382 - protein, 20 aa, Artificial Sequence
  Synthetic
VREYLGIVVVPAATSGWFDP

SEQ ID NO: 10383 - protein, 107 aa, Artificial Sequence
  Synthetic
EIVLTQSPGTLSLSPGERATLSCRASQSVSSSYLAWYQQKPGQAPRLLIYGASSRATGIPDRFSGSGSGTDFTLTISRLEPEDFAVYFCQQYGSSRTFGQGTKVEIK

SEQ ID NO: 10384 - protein, 8 aa, Artificial Sequence
  Synthetic
QQYGSSRT

SEQ ID NO: 10385 - protein, 127 aa, Artificial Sequence
  Synthetic
EVQLVESGGGVVKPGGSLRLSCAASGFTFDDYTMHWVRQAPGKGLEWVSLIIWDGGSGSTFYADSVKGRFTISRDNSKNFLYLEMNSLTTEDTALYYCAKDTPYRSMVTKSYGMDVWGQGTTVTVSS

SEQ ID NO: 10386 - protein, 18 aa, Artificial Sequence
  Synthetic
AKDTPYRSMVTKSYGMDV

SEQ ID NO: 10387 - protein, 107 aa, Artificial Sequence
  Synthetic
DIQMTQSPSSLSASVRDRVTITCRASQSISTYLNWYQQKPGKAPKLLIYAASSLHSGVPSRFSGSGSGTDFTLTISSLQPEDFATYYCQQTYNFPTTFGQGTKVEIK

SEQ ID NO: 10388 - protein, 9 aa, Artificial Sequence
  Synthetic
QQTYNFPTT

SEQ ID NO: 10389 - protein, 120 aa, Artificial Sequence
  Synthetic
EVQLVESGGGLVHPGGSLRLSCAASGFTFNNYDMHWVRQVTGRGLEWVSAIGTSGDTYYQDSVKGRFTISREDAKNSLYLQMNSLRDGDTAVYYCARGASSAWHWYFDFWGRGTPVTVSS

SEQ ID NO: 10390 - protein, 14 aa, Artificial Sequence
  Synthetic
ARGASSAWHWYFDF

SEQ ID NO: 10391 - protein, 108 aa, Artificial Sequence
  Synthetic
DIQMTQSPSSLSASVGDRVSITCRASQSISSFLNWYQARPGKAPKLLIYAASSLQSGVPSRFSGSGSGRDFTLTISSLQPEDFATYYCQQSYSSPPPTFGGGTRVEIK

SEQ ID NO: 10392 - protein, 10 aa, Artificial Sequence
  Synthetic
QQSYSSPPPT

SEQ ID NO: 10393 - protein, 122 aa, Artificial Sequence
  Synthetic
QVQLVQSGAEVKKPGSSVKVSCRASGGTFSNYAIYWVRQAPGQGLEWMGGIIPALGTANYAQKFQDRVTITADISTTTAYMELSSLRSDDTAVYFCARCKVPAAIHGWIDPWGQGTLLTVSS

SEQ ID NO: 10394 - protein, 15 aa, Artificial Sequence
  Synthetic
ARCKVPAAIHGWIDP

SEQ ID NO: 10395 - protein, 107 aa, Artificial Sequence
  Synthetic
DIQMTQSPSSLSASVGDRVTITCQASQDIGNYLNWYQQKPGKAPKLLMYDASNLERGVPSRFSGSRSGTDFIFTINSLQPEDIATYYCQQYDNLPYTFGQGTKLEIK

SEQ ID NO: 10396 - protein, 9 aa, Artificial Sequence
  Synthetic
QQYDNLPYT

SEQ ID NO: 10397 - protein, 128 aa, Artificial Sequence
  Synthetic
EVQLVESGGGLVKPGGSLRLSCAASGFTFTAYSMTWVRQAPGKGLEWVSSISSTSSYIYYADSVKGRFIISRDNARNSLYLQMNSLRVEDTALYYCARVVEGEGNGDDYYYHYGMDVWGQGTTVTVSS

SEQ ID NO: 10398 - protein, 21 aa, Artificial Sequence
  Synthetic
ARVVEGEGNGDDYYYHYGMDV

SEQ ID NO: 10399 - protein, 108 aa, Artificial Sequence
  Synthetic
SYVLTQPPSVSVSPGQTARITCSGDALPKQYAYWYQQKPGQAPVMVMNKDSERPSGIPGRFSGANSGTTVTLTISEVQAEDEADYYCQSADSSGTYRVFGGGTKLTVL

SEQ ID NO: 10400 - protein, 11 aa, Artificial Sequence
  Synthetic
QSADSSGTYRV

SEQ ID NO: 10401 - protein, 124 aa, Artificial Sequence
  Synthetic
EVQLVESGGGLVKPGGSLRLSCAASGFTLSDAWMSWVRQVPGKGLEWVGRIKSEIDGGTTDYAAPVKGRFTISRDDSKNTLYVEMNSLKTEDTAVYYCTVQTKLYYYDYGMDVWGQGTTVTVSS

SEQ ID NO: 10402 - protein, 15 aa, Artificial Sequence
  Synthetic
TVQTKLYYYDYGMDV

SEQ ID NO: 10403 - protein, 107 aa, Artificial Sequence
  Synthetic
DIQMTQSPSTLSASVGDRVTITCRASRSISTWLAWYQQKPGKAPNLLIYKASSLESGVPSRFSGSGSGTEFTLTISSLQPDDFATYYCQQYDTYSWTFGQGTKVEIK

SEQ ID NO: 10404 - protein, 9 aa, Artificial Sequence
  Synthetic
QQYDTYSWT

SEQ ID NO: 10405 - protein, 123 aa, Artificial Sequence
  Synthetic
EVQLVESGGGLVQPGGSLRLSCAASRFTFSSYNMNWVRLAPGKGLEWVSYISSGSSTVYYADSVKGRFTVSRDNAKNSLYLQMNSLRDEDTAVYYCARGSGSRSYYYYGLDVWGQGTTVTVSS

SEQ ID NO: 10406 - protein, 16 aa, Artificial Sequence
  Synthetic
ARGSGSRSYYYYGLDV

SEQ ID NO: 10407 - protein, 106 aa, Artificial Sequence
  Synthetic
DIQMTQSPSSLSASVGDSVTITCRASQDIHHYLNWYQQRPGKAPKLLIYGASSLQSGVPSKFSGSGSGTDFIFTITSLQPEDFATYYCQQSYTTPSTFGQGTKLEI

SEQ ID NO: 10408 - protein, 9 aa, Artificial Sequence
  Synthetic
QQSYTTPST

SEQ ID NO: 10409 - protein, 123 aa, Artificial Sequence
  Synthetic
EVQLVQSGGEVKKPGESLKISCKASGYRFIFYWIAWVRQVPGKGLEWMGVIYPSDSGTRYSPSFQGQVTISADKSISTAYLQWNTLKASDTAMYYCAREALPGETAGDAFDIWGQGTMVTVSS

SEQ ID NO: 10410 - protein, 16 aa, Artificial Sequence
  Synthetic
AREALPGETAGDAFDI

SEQ ID NO: 10411 - protein, 110 aa, Artificial Sequence
  Synthetic
QFVLTQPPSVSATPGQKVTISCSGSSSNIGNNYVSWYQQLPETAPKLLIFEDNKRPSGIPDRFSGSKSGTSATLGITGLQTGDEADYYCGTWDNSLTTVMFGGGTKLTVL

SEQ ID NO: 10412 - protein, 11 aa, Artificial Sequence
  Synthetic
GTWDNSLTTVM

SEQ ID NO: 10413 - protein, 125 aa, Artificial Sequence
  Synthetic
QVQLVESGGGVVQPGRSLRLSCAASGFTFSSYGIHWVRQAPGKGLEWVAVISYDGTDKYYADSVKGRFTISRDNSKNTLYLQMNSLRVEDTAVYYCAKDGGMWYASDWEHYFDYWGQGTLVTVSS

SEQ ID NO: 10414 - protein, 18 aa, Artificial Sequence
  Synthetic
AKDGGMWYASDWEHYFDY

SEQ ID NO: 10415 - protein, 110 aa, Artificial Sequence
  Synthetic
QFVLTQPPSASGTPGQRVTISCSGSSSNIGSDSVNWYQQLPGTAPRLLIFGNNERPTGVPDRFSGSKSATSASLAISGLQSEDEADYYCAAWDDSLNGVIFGGGTKLTVL

SEQ ID NO: 10416 - protein, 11 aa, Artificial Sequence
  Synthetic
AAWDDSLNGVI

SEQ ID NO: 10417 - protein, 123 aa, Artificial Sequence
  Synthetic
QVQLVESGGGVVQPGRSLRLSCAASGFIFSNYGLHWVRQTPGKGLEWVAVISYDGSDKYYADSVKGRFTISRDHSKNTLYLQMNSLRTEDTAVYYCAKEMATHYYHYYGMDVWGQGTTVTVSS

SEQ ID NO: 10418 - protein, 16 aa, Artificial Sequence
  Synthetic
AKEMATHYYHYYGMDV

SEQ ID NO: 10419 - protein, 107 aa, Artificial Sequence
  Synthetic
EIVLTQSPATLSLSPGERATLSCRASQSVSNYLAWYQQKPGQAPRLLMYDASNRATGIPARFRGSGSGTDFTLTISSLEPEDFAVYYCQQRSNWPGTFGQGTRLEIK

SEQ ID NO: 10420 - protein, 9 aa, Artificial Sequence
  Synthetic
QQRSNWPGT

SEQ ID NO: 10421 - protein, 123 aa, Artificial Sequence
  Synthetic
EVQLVESGGGLAQPGGSLTLSCAASGFTFSTYDMHWVRQPAGKGLEWVSGIGTSGDTYYADSVKGRFAISRDDAKNSLYLQMNSLRAGDTAVYYCARVEYTYGYRSYWFFDLWGRGTLVTVSS

SEQ ID NO: 10422 - protein, 17 aa, Artificial Sequence
  Synthetic
ARVEYTYGYRSYWFFDL

SEQ ID NO: 10423 - protein, 108 aa, Artificial Sequence
  Synthetic
DIQMTQSPVSLSASVGDRVTITCRASQTISSYLNWYQQKPGKPPKLLIYAASSLQSGVPSRFSGSGSGTDFTLTISSLQPEDFATYYCQQSYSAPPWTFGPGTKVEVK

SEQ ID NO: 10424 - protein, 10 aa, Artificial Sequence
  Synthetic
QQSYSAPPWT

SEQ ID NO: 10425 - protein, 123 aa, Artificial Sequence
  Synthetic
EVQLVESGGGLVQPGGSLRLSCAASGFMFSRYWMSWVRQAPGKGLEWVANINQDGSETHYVDSVKGRFTISRDNAKNSLYLQMNSLRVEDTAVYYCARDQASYYYDNSGYNYWGQGTLVTVSS

SEQ ID NO: 10426 - protein, 16 aa, Artificial Sequence
  Synthetic
ARDQASYYYDNSGYNY

SEQ ID NO: 10427 - protein, 112 aa, Artificial Sequence
  Synthetic
QFVLTQPPSVSGAPGQRVTISCTGSGSNIGTGYDVHWYQQLPGTAPKLLIYGNSNRPSGVPDRFSGSKSGTSASLAITGLQAEDEADYYCQSSDSSLTGSNVFGGGTKLTVL

SEQ ID NO: 10428 - protein, 12 aa, Artificial Sequence
  Synthetic
QSSDSSLTGSNV

SEQ ID NO: 10429 - protein, 122 aa, Artificial Sequence
  Synthetic
QVQLVESGGGVAQPGKSLRLSCTASGFTFRSYGMHWVRQAPGKGLEWVAVIWNDGSSKHYADSVKGRFTMSRDNSKNTLYLQMNSLRVEDTAVYYCARDGDYGDYVTLFDYWGQGTLVTVSS

SEQ ID NO: 10430 - protein, 15 aa, Artificial Sequence
  Synthetic
ARDGDYGDYVTLFDY

SEQ ID NO: 10431 - protein, 108 aa, Artificial Sequence
  Synthetic
DIQMTQSPSSLSASVGDRVTITCRASQSIRNYLNWYQQKPGKAPRLLIYAASNLQSGVPSRFSGSGSGTDFTLTISSLQLDDFATYYCQQSYNTPPWTFGQGTKVGIQ

SEQ ID NO: 10432 - protein, 10 aa, Artificial Sequence
  Synthetic
QQSYNTPPWT

SEQ ID NO: 10433 - protein, 120 aa, Artificial Sequence
  Synthetic
QVQLVESGGGVVQPGKSLRLSCAASGFTFSSYAMNWVRQAPGKGLEWLAVISSDASSRFYADSVKGRFTISRDNSKNTLYLQMNSLRDEDTAVYYCAKDLDMIVLVLDFWGQGTLVTVSS

SEQ ID NO: 10434 - protein, 13 aa, Artificial Sequence
  Synthetic
AKDLDMIVLVLDF

SEQ ID NO: 10435 - protein, 108 aa, Artificial Sequence
  Synthetic
DIQMTQSPSSLSASVGNRVTISCRASQSINGYLNWYQQKRGKAPKLLIYAASTLQSGVPSRFSGSGSGANFTLTISSLQPEDFATYYCQQSYTTPPLTFGGGTKVEIK

SEQ ID NO: 10436 - protein, 10 aa, Artificial Sequence
  Synthetic
QQSYTTPPLT

SEQ ID NO: 10437 - protein, 126 aa, Artificial Sequence
  Synthetic
QVQLVQSGAEVKKPGASVKVSCKASGYTFTSYDINWVRQATGQGLEWMGWMNPNSGNTAYAQKFLGRVIITRNTSISTAYMELSSLRAEDTAVYYCARGTHCSSTRCYTQNWVDPWGQGTLVTVSS

SEQ ID NO: 10438 - protein, 19 aa, Artificial Sequence
  Synthetic
ARGTHCSSTRCYTQNWVDP

SEQ ID NO: 10439 - protein, 108 aa, Artificial Sequence
  Synthetic
SYVLTQPPSVSVAPGQTARITCGGNNIGSKSVQWYQQKPGQAPVLVVYDDSDRPSGIPERFSGSNSGNTATLTISRVEAGDEADYYCQVWDSSSDPVVFGGGTKLTVL

SEQ ID NO: 10440 - protein, 11 aa, Artificial Sequence
  Synthetic
QVWDSSSDPVV

SEQ ID NO: 10441 - protein, 122 aa, Artificial Sequence
  Synthetic
QVQLVESGGGVVQPGRSLRLSCAASRFTFSNYDMHWVRQTPGKGLEWVAVISHDGSGKFYADSVKGRFTISRDNSNNTVYLQMNRLRTEDTAVYYCAKDYGSQVAWVLLDFWGQGTLVTVSS

SEQ ID NO: 10442 - protein, 15 aa, Artificial Sequence
  Synthetic
AKDYGSQVAWVLLDF

SEQ ID NO: 10443 - protein, 108 aa, Artificial Sequence
  Synthetic
DIQMTQSPSSLSASVGDRVTITCRASQSINNYLNWYQQTPGKAPKLLIYAASSLQSGVPSRFSGSGSGTDFTLTISSLQPEDFATYYCQQSYSTPPITFGQGTRLETK

SEQ ID NO: 10444 - protein, 10 aa, Artificial Sequence
  Synthetic
QQSYSTPPIT

SEQ ID NO: 10445 - protein, 122 aa, Artificial Sequence
  Synthetic
QVQLVQSGAEIKKPGASVKVSCKASGYTFTSYYIHWVRQAPGQGLEWLGIINPDGGSIRNAPKFQGRVTMTSDTSTSTVYMDLSSLKSEDTAVYYCVRDLFVVPASNAFEIWGQGTMVTVSS

SEQ ID NO: 10446 - protein, 15 aa, Artificial Sequence
  Synthetic
VRDLFVVPASNAFEI

SEQ ID NO: 10447 - protein, 107 aa, Artificial Sequence
  Synthetic
DIQLTQSPSFLSASVGDRVTITCRASQGISSYLAWYQQKPGKAPTLLIYAASTLQSGVPSRFSGSGSGTEFTLTISSLQPEDFATYYCQQLNSYPRTFGQGTKVEIK

SEQ ID NO: 10448 - protein, 9 aa, Artificial Sequence
  Synthetic
QQLNSYPRT

SEQ ID NO: 10449 - protein, 124 aa, Artificial Sequence
  Synthetic
EVQLVESGGGLVQPGGSLRLSCAASGFTFSRHDMHWVRQTTGKGLEWVSAIGTAGDTYYSDSVKGRFTISRENAKNSLYLQMNSLRAGDTAVYYCARGANCGGDCYLNWYFDLWGRGTLVTVSS

SEQ ID NO: 10450 - protein, 18 aa, Artificial Sequence
  Synthetic
ARGANCGGDCYLNWYFDL

SEQ ID NO: 10451 - protein, 108 aa, Artificial Sequence
  Synthetic
DIQMTQSPSSLSASVGDRVTFTCRASQGIRNSLAWYQQKPGKAPKLLLYTASRLENGVPSRFSGSGSGTDYTLTISSLQPEDFATYFCQQYYSSPPITFGQGTRLEIK

SEQ ID NO: 10452 - protein, 10 aa, Artificial Sequence
  Synthetic
QQYYSSPPIT

SEQ ID NO: 10453 - protein, 118 aa, Artificial Sequence
  Synthetic
QVQLQESGPGLVKPSGTLSLTCAVSGVSISSPNWWSWVRQSPGKGLEWIGEIYHGGSTNYNPSLKSRVTISLDKSKSLFSLRLTSVTAADTAVYYCARFEAVAVVETWGQGTLVTVSS

SEQ ID NO: 10454 - protein, 11 aa, Artificial Sequence
  Synthetic
ARFEAVAVVET

SEQ ID NO: 10455 - protein, 111 aa, Artificial Sequence
  Synthetic
QFVLTQPASVSGSPGQSITISCTGTSSDVGRFNYVSWYQQHPGKAPKLMIYDVTHRPSGVSYRFSGSKSGNTASLTISGLQAEDEADYFCTSYTSSSTLYVFGTGTKVTVL

SEQ ID NO: 10456 - protein, 11 aa, Artificial Sequence
  Synthetic
TSYTSSSTLYV

SEQ ID NO: 10457 - protein, 127 aa, Artificial Sequence
  Synthetic
QVQLQESGSGLVKPSLTLSLTCTVSGDSISSGSHYWSWIRQPAGKGLEWIGRIYTDGSTYYNPSLQSRVTISVDTSKNQFSLRLSSVTAADTAVYYCARERYCRGTSCSSHNWFDPWGQGTLVTVSS

SEQ ID NO: 10458 - protein, 19 aa, Artificial Sequence
  Synthetic
ARERYCRGTSCSSHNWFDP

SEQ ID NO: 10459 - protein, 111 aa, Artificial Sequence
  Synthetic
QFVLTQPPSVSGAPGQRVTIACTGSSSNIGAGYDVHWYQQLPGTAPKLFIYGNNNRPSGVPDRFSGSKSGTSASLAITGLQAEDEADYYCQSYDSSLSDVVFGGGTKLTVL

SEQ ID NO: 10460 - protein, 11 aa, Artificial Sequence
  Synthetic
QSYDSSLSDVV

SEQ ID NO: 10461 - protein, 131 aa, Artificial Sequence
  Synthetic
QLQLQESGPGLVKPSETLSLTCTVSGASISSSDYYWAWIRQPPGKGLEWIGTIYFGGDTYYTPSLRSRMSISVDTSKNQFSLKLNSVTAADTAVYYCAIGRAGTKTHPRDDYFYFYGLDVWGQGTTVTVSS

SEQ ID NO: 10462 - protein, 23 aa, Artificial Sequence
  Synthetic
AIGRAGTKTHPRDDYFYFYGLDV

SEQ ID NO: 10463 - protein, 108 aa, Artificial Sequence
  Synthetic
SYVLTQPPSVSVSPGQTARITCSGDALPKQYAYWYHQKPGQAPVMVIYKDNETPSGIPERFSGSSSGTTVTLTISGVQAEDEADYYCQSLDTSGTYWVFGGGTKLTVL

SEQ ID NO: 10464 - protein, 11 aa, Artificial Sequence
  Synthetic
QSLDTSGTYWV

SEQ ID NO: 10465 - protein, 122 aa, Artificial Sequence
  Synthetic
  misc_feature (83)..(83): Xaa can be any naturally occurring amino acid
QVQLQESGPGLVKPSGTLSLTCAVSGGSISSSNWWSWVRQPPGKGLEWIGEIYHSGTTNYNPSLKSRVTISVDKSKNQFSLKXSSVTAADTAVYYCARETVGATGEYGMDVWGQGTTVTVSS

SEQ ID NO: 10466 - protein, 15 aa, Artificial Sequence
  Synthetic
ARETVGATGEYGMDV

SEQ ID NO: 10467 - protein, 108 aa, Artificial Sequence
  Synthetic
DIQMTQSPSSLSASVGDRVTITCRTSQSISSYLSWYQQKPGKAPKLLIYAASTLQSGVPSRFSGSGSGTDFILTITNLQPEDFATYYCQQSYSTPPWTFGPGTKVEIK

SEQ ID NO: 10468 - protein, 10 aa, Artificial Sequence
  Synthetic
QQSYSTPPWT

SEQ ID NO: 10469 - protein, 124 aa, Artificial Sequence
  Synthetic
EVQLVESGGGLVQPGGSLRLSCAASGFIFSSYWMSWVRQAPGKGLEWVANIKQDGSEKYYVDSVKGRFTISRDNAKNSLYLLMNSLRVEDTAVYYCARVVGDLPILSPEYFQHWGQGTLVTVSS

SEQ ID NO: 10470 - protein, 17 aa, Artificial Sequence
  Synthetic
ARVVGDLPILSPEYFQH

SEQ ID NO: 10471 - protein, 106 aa, Artificial Sequence
  Synthetic
SYVLTQPPSMSVSPGQTARITCSGDALPRQYAYWYQQKPGQAPVLMIYKDTERPSGIPERFSGSTSGTTVTLTISGVRAEDGADYYCQSADSSGHVFGGGTKLTVL

SEQ ID NO: 10472 - protein, 9 aa, Artificial Sequence
  Synthetic
QSADSSGHV

SEQ ID NO: 10473 - protein, 121 aa, Artificial Sequence
  Synthetic
EVQLVESGGGLVQPGRSLRLSCAASGFSFDDYAMHWVRQAPGKGLQWVSGITWNSDSVAYADSVKGRFTISRDNAKNSLYLQMNSLRVEDTAFYYCAKDMRGTYGDYFDHWGQGSLVTVSS

SEQ ID NO: 10474 - protein, 14 aa, Artificial Sequence
  Synthetic
AKDMRGTYGDYFDH

SEQ ID NO: 10475 - protein, 108 aa, Artificial Sequence
  Synthetic
SYVLTQPPSVSVAPGKTARITCGGNDIGSKSVHWYQQKSGQGPVLVIYYDSDRPSGIPERFSGSNSGNTATLTISRVEAGDEADYYCQVWDSSSDYYVFGTGTKVTVL

SEQ ID NO: 10476 - protein, 11 aa, Artificial Sequence
  Synthetic
QVWDSSSDYYV

SEQ ID NO: 10477 - protein, 123 aa, Artificial Sequence
  Synthetic
QVQLVESGGGVVQPGRSLKLSCAVSGFTFSNYGMHWVRQAPGKGLEWVTMISYDGSDKYYADSVKGRFTISRDNSKNTLNLQMNSLRAADTAVYYCAKTQYSYAYDVYYLDYWGQGTLVTVSS

SEQ ID NO: 10478 - protein, 16 aa, Artificial Sequence
  Synthetic
AKTQYSYAYDVYYLDY

SEQ ID NO: 10479 - protein, 110 aa, Artificial Sequence
  Synthetic
NFVLTQPHSVSESPGKTVTISCTRSSGSIASNYVQWYQQRPGSSPTTLIYEDNQLSSGVPDRFSGSIDSSSNSASLTISGLKTEDEADYYCQSYDSSNVIFGGGTKLTVL

SEQ ID NO: 10480 - protein, 9 aa, Artificial Sequence
  Synthetic
QSYDSSNVI

SEQ ID NO: 10481 - protein, 120 aa, Artificial Sequence
  Synthetic
QVQLVESGGGVVQPGRSQRLSCAASGFTFSNYVMHWVRQAPGKGLEWVAVISYDGSFKFYPDSVKGRFTISRDNSKNTLYLQMNSLRAEDTAVYYCARDHNSNVYLFDSWGQGTLVTVSS

SEQ ID NO: 10482 - protein, 13 aa, Artificial Sequence
  Synthetic
ARDHNSNVYLFDS

SEQ ID NO: 10483 - protein, 108 aa, Artificial Sequence
  Synthetic
DIQMTQSPSSLSASVGDRVTITCRASQSISSYLNWYQQKPGNSPKLLIYAASSLQSEVPSRFSGSGSGTDFTLTISGLQPEDFATYYCQQSYSTLALTFGGGTKVEIK

SEQ ID NO: 10484 - protein, 10 aa, Artificial Sequence
  Synthetic
QQSYSTLALT

SEQ ID NO: 10485 - protein, 124 aa, Artificial Sequence
  Synthetic
QVQLVQSGAEVKKPGASVKVSCKVSRYTLTELSMHWVRQAPGKGLEWMGTFSPEDGETIYARSFQGRVTMTEDTSTDTAYMELSSLRSADTAIYYCAAGTISLTRGGEYYFDYWGQGTLVTVSS

SEQ ID NO: 10486 - protein, 17 aa, Artificial Sequence
  Synthetic
AAGTISLTRGGEYYFDY

SEQ ID NO: 10487 - protein, 106 aa, Artificial Sequence
  Synthetic
SYVLTQPPSVSLSPGQTARITCSGDAFPNQFAFWYQHKPGQAPLLIIYKDTERPSGIPERFFGSSSGTTVTLTISGVQAEDEADYYCQSADSSGVVFGGGTKLTVL

SEQ ID NO: 10488 - protein, 9 aa, Artificial Sequence
  Synthetic
QSADSSGVV

SEQ ID NO: 10489 - protein, 121 aa, Artificial Sequence
  Synthetic
QVQLVESGGGVVQPGRSVRLSCAASGFTFNNYVMHWVRQAPGKGLEWVAVISSDGNNKYYADFVKGRFTISRDNSKNALYLQMNSLRAEDTAMYYCTRDPVRGLIDSFDIWGQGTMVTVSS

SEQ ID NO: 10490 - protein, 14 aa, Artificial Sequence
  Synthetic
TRDPVRGLIDSFDI

SEQ ID NO: 10491 - protein, 107 aa, Artificial Sequence
  Synthetic
DIQMTQSPSSLSASVGDRVTISCRASQSITNYLNWYQQKPGKAPKLLIYAASSLQSGVPSRFTGSGSGTDFTLTISNLQPEDFATYYCQQSYTTLSYTFGQGTKLEI

SEQ ID NO: 10492 - protein, 10 aa, Artificial Sequence
  Synthetic
QQSYTTLSYT

SEQ ID NO: 10493 - protein, 125 aa, Artificial Sequence
  Synthetic
QVQLQESGPGLVKPSQTLSLTCTVSGGSISSDGYYWSWIRQPAGKGLEWIGRIYTGGSTNFNPSLKTRVTISLDTSKNQFSLKLNSVTAADTAVYYCARDPLAVTGTGRPYGTDVWGQGTTVIVS

SEQ ID NO: 10494 - protein, 18 aa, Artificial Sequence
  Synthetic
ARDPLAVTGTGRPYGTDV

SEQ ID NO: 10495 - protein, 107 aa, Artificial Sequence
  Synthetic
EIVLTQSPVTLSLSPGERATLSCRASQSVGRYLAWYQQKPGQAPSLLIHDASNRATGIPARFSGSGSGTDFTLTISSLEPEDFAVYYCQQRSNWLFTFGPGTKVDIK

SEQ ID NO: 10496 - protein, 9 aa, Artificial Sequence
  Synthetic
QQRSNWLFT

SEQ ID NO: 10497 - protein, 121 aa, Artificial Sequence
  Synthetic
EVQLVETGGGLIKPGGSLRLSCAASGLIVSRNYMSWVRQAPGKGLEWISVIYSGGSTFYADSVKGRFTISRDNSNNTLFLQMNTLRADDTAVYFCARGSHPGDYYYGMDVWGQGTTVTVSS

SEQ ID NO: 10498 - protein, 15 aa, Artificial Sequence
  Synthetic
ARGSHPGDYYYGMDV

SEQ ID NO: 10499 - protein, 102 aa, Artificial Sequence
  Synthetic
DIQLTQSPSFLSASVGDRVTITCRASQGISNYLAWYQQKPRKAPKLLIYAASTLQSGVPSRFSGSGSGTEFTLTISSLQPEDFATYYCQHRGFGQGTKVEIK

SEQ ID NO: 10500 - protein, 4 aa, Artificial Sequence
  Synthetic
QHRG

SEQ ID NO: 10501 - protein, 126 aa, Artificial Sequence
  Synthetic
EVQLVESGGGLVKPGGSLRLSCAASGFTFNSDDMNWVRQAPGKGLEWVSSISGSTGYIYYANSVKGRFTISRDNAKKSLYLQMNSLRADDTAVYYCARDSGYYDSSGPHADAFDIWGQGTMVTVSS

SEQ ID NO: 10502 - protein, 19 aa, Artificial Sequence
  Synthetic
ARDSGYYDSSGPHADAFDI

SEQ ID NO: 10503 - protein, 112 aa, Artificial Sequence
  Synthetic
QSVLTQPASVSGSPGQSITISCTGTSSDVGTYNLVSWYQQHPGKAPKLMIYEVSKRPSGISNRFSGSKSGNTASLTISGLQAEDEADYYCCSYAGSITRPYVFGTGTEVTVL

SEQ ID NO: 10504 - protein, 12 aa, Artificial Sequence
  Synthetic
CSYAGSITRPYV

SEQ ID NO: 10505 - protein, 120 aa, Artificial Sequence
  Synthetic
  misc_feature (70)..(70): Xaa can be any naturally occurring amino acid
EVQLVQSGAEVKKPGESLKISCKGSGYSFTTYWIGWVRQMPGKGLEWMGIIYPGDFETRYSPSFQGQVTXSADKSISTAYLQWNSLKASDTAMYYCARLLYGGDTSSADYWGQGTLITVS

SEQ ID NO: 10506 - protein, 14 aa, Artificial Sequence
  Synthetic
ARLLYGGDTSSADY

SEQ ID NO: 10507 - protein, 111 aa, Artificial Sequence
  Synthetic
QFVLTQPASVSGSPGQSITISCTGTSSDIGGYNFVSWYQQHPGKAPKLMIYDVSNRPSEVSNRFSGSKSGNTASLTISGLQAEDEADYHCSSYTSSSTFVIFGGGTKLTVL

SEQ ID NO: 10508 - protein, 11 aa, Artificial Sequence
  Synthetic
SSYTSSSTFVI

SEQ ID NO: 10509 - protein, 131 aa, Artificial Sequence
  Synthetic
QVQLVQSGAEVKKPGASVKVSCKASGYSFTSSDINWVRQAPGQGLEWMGWMNSNSGNTGYAQKFQGRVTMTRDTSISTAFLELSSLRSEDTAIYYCASPGAAYCSTNTCYPNYYYYGFDVWGQGTTVTVSS

SEQ ID NO: 10510 - protein, 24 aa, Artificial Sequence
  Synthetic
ASPGAAYCSTNTCYPNYYYYGFDV

SEQ ID NO: 10511 - protein, 112 aa, Artificial Sequence
  Synthetic
QFVLTQPPSVSGAPGQRVTISCTGSRSNIGAGFDVHWYQQLPATAPKLLIYGTTNRPSGVPDRFSGSKSGTSASLAITGLQAEDEADYYCQSFDNSLSGYYVFGTGTKVTVL

SEQ ID NO: 10512 - protein, 12 aa, Artificial Sequence
  Synthetic
QSFDNSLSGYYV

SEQ ID NO: 10513 - protein, 127 aa, Artificial Sequence
  Synthetic
QVQLVESGGGVVQPGRSLRLSCAVSGFTFSTYGMHWVRQAPGKGLEWVAVISYDGTNKFYLDSVKGRFTVSRDNSKNTLYLQMNSLRVEDTAVYYCAKMDSPYCGGGNCYDGPMDYWGLGTLVTVSS

SEQ ID NO: 10514 - protein, 20 aa, Artificial Sequence
  Synthetic
AKMDSPYCGGGNCYDGPMDY

SEQ ID NO: 10515 - protein, 112 aa, Artificial Sequence
  Synthetic
DIVMTQTPLSLCVTPGQPASISCKSSQSLLHSDVKTYLYWYLQKPGQSPQLLIYEVSNRFSGVPDRFSGSGSGTDFTLEISRVKAEDVGVYYCLQTKQLPYTFGQGTKLEIK

SEQ ID NO: 10516 - protein, 9 aa, Artificial Sequence
  Synthetic
LQTKQLPYT

SEQ ID NO: 10517 - protein, 120 aa, Artificial Sequence
  Synthetic
EVQLLESGGGLVQPGGSLRLSCAASGFTFSSYAMNWVRQAPGKGLEWVSGISASGSGSFYADSVKGRFTISRDNSKNTLYLQMNSLRAEDTAVYYCAKDVITMMVVWDYWGQGTLVTVSS

SEQ ID NO: 10518 - protein, 13 aa, Artificial Sequence
  Synthetic
AKDVITMMVVWDY

SEQ ID NO: 10519 - protein, 108 aa, Artificial Sequence
  Synthetic
DIQMTQSPSSLSASLGDRVTITCRASQSITNYLNWYQQKPGKAPKLLIYAASNLQSGVPSRFSGSGSGTDFTLTIASLQPEDFATYYCQQSYTTLSLTFGGGTKVEIK

SEQ ID NO: 10520 - protein, 10 aa, Artificial Sequence
  Synthetic
QQSYTTLSLT

SEQ ID NO: 10521 - protein, 119 aa, Artificial Sequence
  Synthetic
EVQLVESGGGLVQPGGSLRLSCVASGFTFSDYDMHWVRQGTGKSLEWVSAIGTAGDTYYADSVKGRFTISRENAKKSLFLQMNSLTAGDTAVYYCARGWWEKDWFFDLWGRGTLVTVSS

SEQ ID NO: 10522 - protein, 13 aa, Artificial Sequence
  Synthetic
ARGWWEKDWFFDL

SEQ ID NO: 10523 - protein, 107 aa, Artificial Sequence
  Synthetic
DIQMTQSPSSLSASVGDRVTITCRASQGIRNFLAWYQQKPGKAPKLLLYAVSRLESGVPSRFSGSGSGTDYTLTISSLQPEDFATYYCQQYYSMPPVTFGQGTKLEI

SEQ ID NO: 10524 - protein, 10 aa, Artificial Sequence
  Synthetic
QQYYSMPPVT

SEQ ID NO: 10525 - protein, 130 aa, Artificial Sequence
  Synthetic
QVQLVQSGAEVKKPGSSVKVSCKASGGTFSNYAFNWVRQAPGQGLEWMGGIIPLFGTANYGPKFQGRVTITADKSTTTAYMELSSLRSEDTAVYYCARETLQYDDVWGSYSPHYYGMDVWGQGTTVTVSS

SEQ ID NO: 10526 - protein, 23 aa, Artificial Sequence
  Synthetic
ARETLQYDDVWGSYSPHYYGMDV

SEQ ID NO: 10527 - protein, 106 aa, Artificial Sequence
  Synthetic
DIQLTQSPVSLSASVGDRVTITCRASQGISSYLAWYQQKPGKAPKLLIYAASTLQSGVPSRFSGSGSGTEFTLTISSLQPEDFATYYCQQLNSYLTFGGGTKVEIK

SEQ ID NO: 10528 - protein, 8 aa, Artificial Sequence
  Synthetic
QQLNSYLT

SEQ ID NO: 10529 - protein, 122 aa, Artificial Sequence
  Synthetic
QVQLVESGGGVVQPGKSLRLSCGASGFTFRRYGMHWVRQAPGKGLEWVAVILFDGSNEHYADSVKGRFTISRDNSKNTLYLQMNSLRAEDTAVYYCAKESFGYGGNNYFDYWGQGTLVTVSS

SEQ ID NO: 10530 - protein, 15 aa, Artificial Sequence
  Synthetic
AKESFGYGGNNYFDY

SEQ ID NO: 10531 - protein, 106 aa, Artificial Sequence
  Synthetic
DIQMTQSPSTLSASVGDRVTITCRASQTIYRWLAWYQQKPGKAPKFLIYEASSLESGVPSRFSGSGSGTEFTLTISSLQPDDFATYYCQQYSSYWTFGQGTKVEIK

SEQ ID NO: 10532 - protein, 8 aa, Artificial Sequence
  Synthetic
QQYSSYWT

SEQ ID NO: 10533 - protein, 134 aa, Artificial Sequence
  Synthetic
QVQLVQSGAEVKKPGASMKVSCKASGYTFPGYYIHWVRQAPGQGLEWMGWINPNTGATDYAQKFQGRVTMTRDTASRTAYMELSRLKSDDTAVYYCSRPRGPSNTDDFWSTSLKTAGVFGMDVWGLGTTVTVSS

SEQ ID NO: 10534 - protein, 27 aa, Artificial Sequence
  Synthetic
SRPRGPSNTDDFWSTSLKTAGVFGMDV

SEQ ID NO: 10535 - protein, 112 aa, Artificial Sequence
  Synthetic
  misc_feature (9)..(9): Xaa can be any naturally occurring amino acid
DIVMTQTPXSLSVTPGQPASISCKSRQSLLHSDGKTYLYWYLQKPGQSPQLLIYEVSNRFSGVPERFSGSGSGTDFTLKISRVEAEDVGIYYCMQSKQLPLTFGGGTKVEIK

SEQ ID NO: 10536 - protein, 9 aa, Artificial Sequence
  Synthetic
MQSKQLPLT

SEQ ID NO: 10537 - protein, 126 aa, Artificial Sequence
  Synthetic
QVQLVQSGAEVKKPGSSVKVSCKASGGTFTSYLISWVRQAPGQGLQWMGRIIPGFGATNYAQEFQGRVTITADESTTTAYMELSSLRSGDTAVYYCARSPVHGSGSYYDELFFDSWGQGTLVTVSS

SEQ ID NO: 10538 - protein, 19 aa, Artificial Sequence
  Synthetic
ARSPVHGSGSYYDELFFDS

SEQ ID NO: 10539 - protein, 106 aa, Artificial Sequence
  Synthetic
SYVLTQPPSVSVSPGQTARITCSGHTLPNQYLYWYQQKPGQAPVLVIYKDIERPSGIPERFSASSSGTTVTLTISGVQAEDEADYYCQSADSSGVVFGGGTKLTVL

SEQ ID NO: 10540 - protein, 9 aa, Artificial Sequence
  Synthetic
QSADSSGVV

SEQ ID NO: 10541 - protein, 122 aa, Artificial Sequence
  Synthetic
EVQLLESGGGLVQPGGSLRLSCAASGFTFSSYAMSWVRQAPGKGLEWVSPISVSGDRTYYADSVKGRFTISRDNSKNTLYLEMKSLRVEDTAVYYCARVPYDFQHPTYFDYWGQGTLVTVSS

SEQ ID NO: 10542 - protein, 15 aa, Artificial Sequence
  Synthetic
ARVPYDFQHPTYFDY

SEQ ID NO: 10543 - protein, 103 aa, Artificial Sequence
  Synthetic
EIVLTQSPATLSLSPGERATLSCRASQSVSSYLAWYQQKPGQAPRLLIYDASHRATGIPARFSGGGSGTDFTLTISNLEPEDFAVYYCQSADTFGQGTKLEIK

SEQ ID NO: 10544 - protein, 5 aa, Artificial Sequence
  Synthetic
QSADT

SEQ ID NO: 10545 - protein, 117 aa, Artificial Sequence
  Synthetic
EVQLVESGGGLVQPGGSLRLSCEASEIIVSRNYMSWVRQAPGKGLEWVSVIYSGGTTFYADSVKGRFTISRDNSRNTLYLEMNSLRVEDTAVYYCARDWREDAMDVWGQGTTVTVSS

SEQ ID NO: 10546 - protein, 11 aa, Artificial Sequence
  Synthetic
ARDWREDAMDV

SEQ ID NO: 10547 - protein, 108 aa, Artificial Sequence
  Synthetic
DIQLTQSPSFLSASVGDTVTITCRASQGISSYLAWYQQKPGKAPKLLIYAASTLQSGVPSRFSGSGSGTEFTLTISSLQPEDVATYYCQQLNSYPGFTFGPGTKVDIK

SEQ ID NO: 10548 - protein, 10 aa, Artificial Sequence
  Synthetic
QQLNSYPGFT

SEQ ID NO: 10549 - protein, 122 aa, Artificial Sequence
  Synthetic
EVQLVESGGGLVQPGRSLRLSCAASGFTFDDYVMHWVRQAPGKGLEWVSSISWNSGSIGYADSVKGRFTISRDNAKNSLYLQMNSLRADDTAFYYCAKGPWGELVSAGMDVWGQGTTVTVSS

SEQ ID NO: 10550 - protein, 15 aa, Artificial Sequence
  Synthetic
AKGPWGELVSAGMDV

SEQ ID NO: 10551 - protein, 110 aa, Artificial Sequence
  Synthetic
QSVLTQEPSLTVSPGGTVTLTCGSSTGAVTSGHCPYWFQQKPGQAPRTLIYDTTNEHSWTPARFSGSLLGGKAALTLSGAQPEDEAEYYSFLYYSGPPWVFGGGTKLTVL

SEQ ID NO: 10552 - protein, 10 aa, Artificial Sequence
  Synthetic
FLYYSGPPWV

SEQ ID NO: 10553 - protein, 117 aa, Artificial Sequence
  Synthetic
EVQLVESGGGLIQPGGSLRLSCAASGFTVSSIYMNWIRQAPGKGLEWVSVIYSGGSTFYADSVKGRFTISRDNSKNTLYLQMNSLRAEDTAVYYCARATWDRGFDYWGRGTLVTVSS

SEQ ID NO: 10554 - protein, 11 aa, Artificial Sequence
  Synthetic
ARATWDRGFDY

SEQ ID NO: 10555 - protein, 108 aa, Artificial Sequence
  Synthetic
DIQMTQSPSSLSASVGDRVIITCQASQDISKYLNWYQQKAGKAPKLLIYDASNLETGVPSRFSGSGSGTDFTFTISSLQPEDIATYYCQQYDNLPQYTFGQGTKVEIK

SEQ ID NO: 10556 - protein, 10 aa, Artificial Sequence
  Synthetic
QQYDNLPQYT

SEQ ID NO: 10557 - protein, 123 aa, Artificial Sequence
  Synthetic
EVQLVQSGAEVKKPGESLKISCKTSGYSFNYFWIGWVRQMPGKGLEWMGIIYPGDSETRYSPSFQGQVTISADKSITTAYLQWSSLKASDTAIYYCARHGDYMSTTLPDFDYWGQGTLVTVSS

SEQ ID NO: 10558 - protein, 16 aa, Artificial Sequence
  Synthetic
ARHGDYMSTTLPDFDY

SEQ ID NO: 10559 - protein, 108 aa, Artificial Sequence
  Synthetic
SYVLTQPPSVSVAPGQTARIPCGGNNIGNKRVHWYQQKARQAPVLVVNDDSDRPSGIPERFSGSNSGNTATLTISRVEAGDEADYYCQVWDSNSDLVVFGGGTKLTVL

SEQ ID NO: 10560 - protein, 11 aa, Artificial Sequence
  Synthetic
QVWDSNSDLVV

SEQ ID NO: 10561 - protein, 121 aa, Artificial Sequence
  Synthetic
EVQLVESGGHLVQPGRSLRLSCVASGFIFDDYAMHWVRQAPGKGLEWVSGINWNSASIGYADSVRGRFTISRDNAKNSLFLQMNSLRTDDTALYYCAKGALGEWELLLDYWGQGTLVTVSS

SEQ ID NO: 10562 - protein, 14 aa, Artificial Sequence
  Synthetic
AKGALGEWELLLDY

SEQ ID NO: 10563 - protein, 111 aa, Artificial Sequence
  Synthetic
QSVLTQSPSASASLGASVKLTCTVGSGHSVYAIAWHQQQPERGPRCLMRLNSDGSYNKGDGIPDRFSGSSSGAERYLIISSLQSEDEADYYCQTWGNGIQVFGGGTKLTVL

SEQ ID NO: 10564 - protein, 9 aa, Artificial Sequence
  Synthetic
QTWGNGIQV

SEQ ID NO: 10565 - protein, 120 aa, Artificial Sequence
  Synthetic
QVQLVESGGGVVQPGRSLRLSCAASGFTFSNYGMHWVRQAPGKGLEWVAVIWYDGSGKHYADSVKGRFTISRDNSKNTVYLQMNSLRADDTGVYYCARDRGEMTTYFDYWGQGTLVTVSS

SEQ ID NO: 10566 - protein, 13 aa, Artificial Sequence
  Synthetic
ARDRGEMTTYFDY

SEQ ID NO: 10567 - protein, 108 aa, Artificial Sequence
  Synthetic
DIQMTQSPSSLSASVGDRVTITCRASQSISSHLNWYQQKPGKAPKLLIYAASSLQSGVPSRFSGSGSGTDFTLTITSLQPEDFATYYCQQSYSTPPWTFGQGTKVETK

SEQ ID NO: 10568 - protein, 10 aa, Artificial Sequence
  Synthetic
QQSYSTPPWT

SEQ ID NO: 10569 - protein, 119 aa, Artificial Sequence
  Synthetic
EVQLVESGGGLVQPGGSLRLSCAASGFTFRSYWMTWVRQAPGKGLEWVANIKEDGNERYYVDSVKGRFTISRDNAKNSLYLQLNSLRAEDTAVYYCARARWLRGGFDYWGQGSLVTVSS

SEQ ID NO: 10570 - protein, 12 aa, Artificial Sequence
  Synthetic
ARARWLRGGFDY

SEQ ID NO: 10571 - protein, 110 aa, Artificial Sequence
  Synthetic
NFVLTQPHSVSESPGKTVTISCTRSGGYIASNYVQWYQQRPGSSPTIVIYEDDQRPSGVPDRFSGSIDSSSDSASLTISGLKTEDEADYYCQSHGTSNVVFGGGTKLTVL

SEQ ID NO: 10572 - protein, 9 aa, Artificial Sequence
  Synthetic
QSHGTSNVV

SEQ ID NO: 10573 - protein, 123 aa, Artificial Sequence
  Synthetic
QVQLVQSGAEVKKPGASVKVSCKASGYTFINYYLNWVRQAPGQGLEWMGIINPSGGSTTYAQKFQGRVSMTGDTSTSTVYMELSSLRSEDTAVYYCARDTERIPAATSYFDYWGQGTLVSVSS

SEQ ID NO: 10574 - protein, 16 aa, Artificial Sequence
  Synthetic
ARDTERIPAATSYFDY

SEQ ID NO: 10575 - protein, 107 aa, Artificial Sequence
  Synthetic
DIQMTQSPSTLSASVGDRVTITCRASQSISSWLAWYQQKPGKAPKVLIYRASSLESGVPSRFSGSGSGTEFTLTISSLQPDDFATYYCQQYNSYSRTFGQGTKVEIK

SEQ ID NO: 10576 - protein, 9 aa, Artificial Sequence
  Synthetic
QQYNSYSRT

SEQ ID NO: 10577 - protein, 123 aa, Artificial Sequence
  Synthetic
QVQLVQSGAEMKKPGASVKVSCKASGYTFTDYCIHWVRQAPGQGLEWMGWINPISGGTKYAQKFQGWVSMTRDMSIITVYMEFSRLKSDDTAVYYCARGPLFHYSEKFAFDIWGQGTLVTVSS

SEQ ID NO: 10578 - protein, 16 aa, Artificial Sequence
  Synthetic
ARGPLFHYSEKFAFDI

SEQ ID NO: 10579 - protein, 110 aa, Artificial Sequence
  Synthetic
QFVLTQPASVSGSPGQSITISCTGSNTDVGAYNYVSWYQQHPGKAPRLMIYDVSNRPSGVSNRFSGSKSGNTASLTISGLQPEDEADYYCTSYTTSSTVVFGGGTKLTVL

SEQ ID NO: 10580 - protein, 10 aa, Artificial Sequence
  Synthetic
TSYTTSSTVV

SEQ ID NO: 10581 - protein, 118 aa, Artificial Sequence
  Synthetic
EVQLLESGGGLVQPGGSLRLSCAASGFTFNNYAMTWVRQAPGKGLEWVSTISGTGGATNYADSVRGRFTISRDNSKNSMFLEMNSLRAEDTAVYFCAKPATAKAEDYWGQGTLVAVSS

SEQ ID NO: 10582 - protein, 11 aa, Artificial Sequence
  Synthetic
AKPATAKAEDY

SEQ ID NO: 10583 - protein, 106 aa, Artificial Sequence
  Synthetic
DIQMTQSPSSLSASIGDRVTITCRASQTINNYLNWYQQKPGKAPKLLIYVASSLQSGVPSRFSGSGSGTDFTLTISSLQPEDSATYYCQQSYSWYSFGQGTKLEIK

SEQ ID NO: 10584 - protein, 8 aa, Artificial Sequence
  Synthetic
QQSYSWYS

SEQ ID NO: 10585 - protein, 131 aa, Artificial Sequence
  Synthetic
QVQLQESGPGLVKPSQTLSLTCSVSGGSLSSGSYYWSWIRQPAGKGLEWIGRIYSSGSTDYSPSLKSRVTISVDTSKNQFSLKVSSVTAADTAVYYCAREINVGLGYCTTGVCLGNWFDPWGQGTLVTVSS

SEQ ID NO: 10586 - protein, 23 aa, Artificial Sequence
  Synthetic
AREINVGLGYCTTGVCLGNWFDP

SEQ ID NO: 10587 - protein, 112 aa, Artificial Sequence
  Synthetic
QSVLTQPPSASGTPGQRVTISCSGSSSNIGSNYVHWYQQLPGTAPKLLIYRNNQRPSGVPDRFSGSKSGTSASLAISGLRSEDEADFYCATWDDSVSGPGWVFGGGTKLTVL

SEQ ID NO: 10588 - protein, 13 aa, Artificial Sequence
  Synthetic
ATWDDSVSGPGWV

SEQ ID NO: 10589 - protein, 122 aa, Artificial Sequence
  Synthetic
QVQLVQSGAVVKKPGSSVKVSCKTSGGTFSSYTISWVRQAPGQGLEWMGRIIPFLGVANYAQKFQGRVTITADKSTSTAYMDLSSLRSEDTAVYYCAKDASGDYNSYYFDYWGQGTLVTVSS

SEQ ID NO: 10590 - protein, 15 aa, Artificial Sequence
  Synthetic
AKDASGDYNSYYFDY

SEQ ID NO: 10591 - protein, 111 aa, Artificial Sequence
  Synthetic
QFVLTQPPSVSGAPGQRVTISCTGSNSNIGAGYDVHWYQQLPGTAPKLLIFGNNNRPSGVPDRFSASKSVTSASLAITGLQAEDEADYYCQSYDSSLSDSVFGGGTKLTVL

SEQ ID NO: 10592 - protein, 11 aa, Artificial Sequence
  Synthetic
QSYDSSLSDSV

SEQ ID NO: 10593 - protein, 129 aa, Artificial Sequence
  Synthetic
EVQLVESGGGVVRPGGSLRLSCAASGFSFDDYGMTWVRQVPGKGLEWVSGINWSGSSSTYADSVKGRFTISRDNAKNSLYLQINSLRAEDTAFYYCARDMFPGDYMVVTAQAQNPFDIWGQGTMVTVSS

SEQ ID NO: 10594 - protein, 22 aa, Artificial Sequence
  Synthetic
ARDMFPGDYMVVTAQAQNPFDI

SEQ ID NO: 10595 - protein, 107 aa, Artificial Sequence
  Synthetic
DIQMTQSPSSVSASVGDRVTFTCRASQGISTWLAWYQQKPGKAPKLLIYAASTLQTGVPSRFSGSGSARDFTLTISSLQPEDFATYYCQQANSFPITFGQGTRLEIK

SEQ ID NO: 10596 - protein, 9 aa, Artificial Sequence
  Synthetic
QQANSFPIT

SEQ ID NO: 10597 - protein, 127 aa, Artificial Sequence
  Synthetic
QVQLVESGGGVVQPGTSLRLSCAASGFTFSNYGIHWVRQAPGKGLEWVAVISYDGTDKYYTDSVKGRFTISRDNSKNTLYLQMINLRAEDAAVYYCAKQSQTYCSAGDCLGGYFDYWGQGTLVTVSS

SEQ ID NO: 10598 - protein, 20 aa, Artificial Sequence
  Synthetic
AKQSQTYCSAGDCLGGYFDY

SEQ ID NO: 10599 - protein, 107 aa, Artificial Sequence
  Synthetic
DIQMTQSPSSLSASVGDRVTITCQASQDISDYLNWYQQKPGKAPNLLIYDASNLETGVPSRFSGSGSGTDFTFTISSLQPEDIATYYCQQYDNVPLTFGGGTKVEIK

SEQ ID NO: 10600 - protein, 9 aa, Artificial Sequence
  Synthetic
QQYDNVPLT

SEQ ID NO: 10601 - protein, 121 aa, Artificial Sequence
  Synthetic
EVQLVQSGAEVKKPGESLTISCKTSGYNFTTYWIGWVRQMPGTGLEYMGIIYPDDSDTTYSPSFQGQVTISVDKSTSTAYLHWNNLKASDTAIYYCARRGVAGLLRFFDYWGQGTLVTVSS

SEQ ID NO: 10602 - protein, 14 aa, Artificial Sequence
  Synthetic
ARRGVAGLLRFFDY

SEQ ID NO: 10603 - protein, 110 aa, Artificial Sequence
  Synthetic
QFVLTQPPSVSEAPRQRVTISCSGSSSNIGNNAVNWYQQLPGKAPKLLIYYDYLLPSGVSDRFSGSKSGTSVSLAISGLQSEDEADYYCAAWDDSLNGWVFGGGTKLTVL

SEQ ID NO: 10604 - protein, 11 aa, Artificial Sequence
  Synthetic
AAWDDSLNGWV

SEQ ID NO: 10605 - protein, 117 aa, Artificial Sequence
  Synthetic
EVQLVESGGGLVQPGGSLRLSCAASGFTVSSNYMSWVRQAPGKGLEWVSVVYSGGSTFYADSVKGRFTISRDSSKNTLYLQMNNLRVEDTAVYYCARDPVLPHMDVWGQGTTVTVSS

SEQ ID NO: 10606 - protein, 11 aa, Artificial Sequence
  Synthetic
ARDPVLPHMDV

SEQ ID NO: 10607 - protein, 108 aa, Artificial Sequence
  Synthetic
DIQMTQSPSSLSASVGDRVTITCQASQDINIHLNWYQQKPGKAPKLLIYDASNLETGVPSRFRGSGSGTDFIFTISSLQPEDIATYYCQHYDSLLQKTFGGGTKVEIK

SEQ ID NO: 10608 - protein, 10 aa, Artificial Sequence
  Synthetic
QHYDSLLQKT

SEQ ID NO: 10609 - protein, 127 aa, Artificial Sequence
  Synthetic
QVQLVESGGGVVQPGRSLRLSCAASGFIFSSYGMHWVRQAPGKGLEWVAVIWFDGTSKYYGDSVKGRFIISRDNSKNTVYLQMNTLRGDDTAVYFCAREGRQLYSLPGAHYYGMDVWGQGTTVTVSS

SEQ ID NO: 10610 - protein, 20 aa, Artificial Sequence
  Synthetic
AREGRQLYSLPGAHYYGMDV

SEQ ID NO: 10611 - protein, 107 aa, Artificial Sequence
  Synthetic
DIQMTQSPSTLSASVRDRVTITCRANQTFSGWLAWYQQKPGKAPKLVIYKASSLESGVPSRFSGSGSGTEFTLTINSLQPDDFATYYCQQYYSYPWTFGQGTKVEIK

SEQ ID NO: 10612 - protein, 9 aa, Artificial Sequence
  Synthetic
QQYYSYPWT

SEQ ID NO: 10613 - protein, 124 aa, Artificial Sequence
  Synthetic
QVQLQQWGAGLLKPSETLSLTCAVYGGSFSGYYWSWIRQPPGKGLEWIGEITHSGITNYNPSLKSRVTISVDTSIDTSKNQFSLTLSSVTAADTAVYYCASLTPWLALGRMDVWGQGTTVTVSS

SEQ ID NO: 10614 - protein, 14 aa, Artificial Sequence
  Synthetic
ASLTPWLALGRMDV

SEQ ID NO: 10615 - protein, 107 aa, Artificial Sequence
  Synthetic
DIQMTQSPSSLSASVGDRVTITCRASQGIRNDLGWYQQKPGKAPKRLIYTASSLESGVPSRFSGSGSGTEFTLTISSLQPEDFATYYCLQHNSYPRTFGQGTKVEIK

SEQ ID NO: 10616 - protein, 9 aa, Artificial Sequence
  Synthetic
LQHNSYPRT

SEQ ID NO: 10617 - protein, 127 aa, Artificial Sequence
  Synthetic
QVQLVESGGGVVQPGRSLRLSCAASGFTFSKYGMHWVRQAPGKGLEWVAVISYDGSNEYYGDSVKGRFTISRDSSKNTLYLQMNSLRLEDTAVYYCAKTRDSYCAAGSCYSGLTDYWGQGTLVTVSS

SEQ ID NO: 10618 - protein, 20 aa, Artificial Sequence
  Synthetic
AKTRDSYCAAGSCYSGLTDY

SEQ ID NO: 10619 - protein, 107 aa, Artificial Sequence
  Synthetic
DIQMTQSPSSLSASIGDRVTITCQASQDIRTYLNWYQQKPGKAPKLLIYDASILETGVPSRFSGSGSGTDFTFTISSLQPEDIATYYCQHYDNLPWTFGQGTTVEVK

SEQ ID NO: 10620 - protein, 9 aa, Artificial Sequence
  Synthetic
QHYDNLPWT

SEQ ID NO: 10621 - protein, 117 aa, Artificial Sequence
  Synthetic
EVQLVESGGGLIQPGGSLRLSCAASEFIVSTNYMTWVRQAPGKGLEWVSTIYAGGSTFYADSVKGRFTVSRDHSKNTLYLQMNSLRVEDTAVYYCARDWGDFYFDYWGQGTLVTVSS

SEQ ID NO: 10622 - protein, 11 aa, Artificial Sequence
  Synthetic
ARDWGDFYFDY

SEQ ID NO: 10623 - protein, 108 aa, Artificial Sequence
  Synthetic
EIVLTQSPGTLSLSPGERATLSCRASQSLGSSYLAWYQQKPGQAPRLLIYGASNRATGIPDRFSGSGSETDFTLTISRLEPEDFAVFYCQQYGSSPRTFGQGTKVEMK

SEQ ID NO: 10624 - protein, 9 aa, Artificial Sequence
  Synthetic
QQYGSSPRT

SEQ ID NO: 10625 - protein, 124 aa, Artificial Sequence
  Synthetic
EVQLVESGGGLIQPGGSLRLSCAASGFSVSLNYMSWVRQAPGKGLEWVSLIYSGGNTFYADSVKGRFTISRDNSKNTLYLQMTSLRAEDTAVYYCARTNIVILPSAHGYHFDCWGQGTLVTVSS

SEQ ID NO: 10626 - protein, 18 aa, Artificial Sequence
  Synthetic
ARTNIVILPSAHGYHFDC

SEQ ID NO: 10627 - protein, 106 aa, Artificial Sequence
  Synthetic
DIQMTQSPSTLSASVGDRVTITCRASQSIGSWLAWYQLKPGKAPKLLIYKASNLESGVPSRFSGSGSGTEFTLTISSLQPDDFATYYCQQYKSYSGFGPGTKVDFK

SEQ ID NO: 10628 - protein, 8 aa, Artificial Sequence
  Synthetic
QQYKSYSG

SEQ ID NO: 10629 - protein, 121 aa, Artificial Sequence
  Synthetic
QVQLVQSGAEVKKPGASVKISCTASGYTFTNYYIQWVRQVPGQGLEWMAIINPGGGGTTSAQKFQGRLTMTRDTSTSTVYMELSSLRSDDTAVYYCAREPLLGARGWFDYWGQGSLVSVSS

SEQ ID NO: 10630 - protein, 14 aa, Artificial Sequence
  Synthetic
AREPLLGARGWFDY

SEQ ID NO: 10631 - protein, 111 aa, Artificial Sequence
  Synthetic
SYVLTQPPSVSVAPGQTARITCGGNDIGSKSVHWYQQKPGQAPVLVVYDDSDRPSGIPERFSGSNSGNTATLTISRVEAGDEADYYCQVWDGSGDHPPYYVFGTGTKVTVL

SEQ ID NO: 10632 - protein, 14 aa, Artificial Sequence
  Synthetic
QVWDGSGDHPPYYV

SEQ ID NO: 10633 - protein, 122 aa, Artificial Sequence
  Synthetic
EVQLVESGGGLVHPGGSLRLSCAASAFSFSNYDMHWVRQVTGKSLEWVALIGTAGDTYYSDSVKGRFTISRENAKNSLYLQMNSLRPGDTAMYYCARGLYDSSNIYSWFDPWGQGTLVTVSS

SEQ ID NO: 10634 - protein, 16 aa, Artificial Sequence
  Synthetic
ARGLYDSSNIYSWFDP

SEQ ID NO: 10635 - protein, 107 aa, Artificial Sequence
  Synthetic
DIQMTQSPSSLSASVGDRVTISCRASQYIGRYLNWYQLKPGKAPKLLIYTASSLQSGVPSRFSGSGSGTDFTLTITSLQAEDFATYYCQQTYNIPPITFGQGTRLEI

SEQ ID NO: 10636 - protein, 10 aa, Artificial Sequence
  Synthetic
QQTYNIPPIT

SEQ ID NO: 10637 - protein, 117 aa, Artificial Sequence
  Synthetic
EVQLVESGGGLIQPGGSLRLSCAASGIIVSSNYMSWVRQAPGKGLEWVSIIYGGGSTFYADSVQGRFTISRDNSKNTLYLQMNNLRADDTAVYYCARDLGPYGVDVWGQGTTVTVSS

SEQ ID NO: 10638 - protein, 11 aa, Artificial Sequence
  Synthetic
ARDLGPYGVDV

SEQ ID NO: 10639 - protein, 108 aa, Artificial Sequence
  Synthetic
DIQLTQSPSFLSASVGDRVTITCRASQGISSSLAWYQQNPGKAPRLLIYGASTLQSGVPSRFSGSGSGTEFTLTISSLQPEDFATYYCQQVNGNPLGTFGQGTKLEIK

SEQ ID NO: 10640 - protein, 10 aa, Artificial Sequence
  Synthetic
QQVNGNPLGT

SEQ ID NO: 10641 - protein, 127 aa, Artificial Sequence
  Synthetic
QVQLVQSGAEVKKPGSSVKVSCKASGGTFSNHTISWVRQAPGQGLEWMGGIIPIFGRATYAQKFQGRVTITADKPTSTAYMELSSLRSEDTAVYYCATYKYGITIFGVVEGHGVDVWGLGTTVTASS

SEQ ID NO: 10642 - protein, 20 aa, Artificial Sequence
  Synthetic
ATYKYGITIFGVVEGHGVDV

SEQ ID NO: 10643 - protein, 107 aa, Artificial Sequence
  Synthetic
  misc_feature (9)..(10): Xaa can be any naturally occurring amino acid
EIVMTQSPXXLSVSPGERATLSCRASQSINSNLAWYQQKPGQAPRLLIYGASTGATGIPARFSGSGSGTEFTLTISSLQSEDFAVYYCHQYDYWPQTFGPGTKVEIK

SEQ ID NO: 10644 - protein, 9 aa, Artificial Sequence
  Synthetic
HQYDYWPQT

SEQ ID NO: 10645 - protein, 124 aa, Artificial Sequence
  Synthetic
QVQLVQSGTEVKQPGASVKISCKASGYTFTNYYMHWVRQAPGQGLEWMGIINPSGDSTTYAQKLQGRVTMTSDTSTNIVYMELSRLKFEDTAVYYCARGPLIPNWGQYNWFDPWGQGTLVTVSS

SEQ ID NO: 10646 - protein, 17 aa, Artificial Sequence
  Synthetic
ARGPLIPNWGQYNWFDP

SEQ ID NO: 10647 - protein, 107 aa, Artificial Sequence
  Synthetic
DIQMTQSPSSLSASVGDRVTITCRASQGISNWLAWYQQKPGKAPNLLIYAASTLQSGVPSRFSGSGSGTDFTLTISSLQPEDFATYYCQQANSFPPTFGGGTKVEIK

SEQ ID NO: 10648 - protein, 9 aa, Artificial Sequence
  Synthetic
QQANSFPPT

SEQ ID NO: 10649 - protein, 120 aa, Artificial Sequence
  Synthetic
QVQLVQSGAEVKKPGSSVKVSCKASGGTFSSYAIDWVRQAPGQGLEWMGGIIPIFGTTNYAQKFQGRVTITADDSTSTAFMELSSLRSEDTAIYYCAKVPGYYTGAFDIWGQGTMVTVSS

SEQ ID NO: 10650 - protein, 13 aa, Artificial Sequence
  Synthetic
AKVPGYYTGAFDI

SEQ ID NO: 10651 - protein, 109 aa, Artificial Sequence
  Synthetic
DIQMTQSPSSLSASVGDRVTITCQASQDITNYLNWYQQKPGKAPKLLIFDASNLETGVPSRFSGSGSGTDFTFTISSLQPEDIATYYCQQYDNLPPSITFGQGTRLEIK

SEQ ID NO: 10652 - protein, 11 aa, Artificial Sequence
  Synthetic
QQYDNLPPSIT

SEQ ID NO: 10653 - protein, 119 aa, Artificial Sequence
  Synthetic
QVQLQESGPGLVKPSETLSLTCTVSGGSISSYYWNWIRQPPGKGLEWIGYIYYSGSTNYNPSLKSRVSISVDTSKNQFSLKLSSVTAADTAVYYCARDYGGNLQYFPHWGQGTLVTVSS

SEQ ID NO: 10654 - protein, 13 aa, Artificial Sequence
  Synthetic
ARDYGGNLQYFPH

SEQ ID NO: 10655 - protein, 107 aa, Artificial Sequence
  Synthetic
DIQMTQSPSSLSASVGDRVTITCQASQDINNYLTWYQQKPGKAPKVLIYDASNLEAGVPSRFSGSGSGTDFTFTISSLQPEDIATYYCQQYDNLPPTFGGGTKVETK

SEQ ID NO: 10656 - protein, 9 aa, Artificial Sequence
  Synthetic
QQYDNLPPT

SEQ ID NO: 10657 - protein, 123 aa, Artificial Sequence
  Synthetic
EVQLVESGGGLVQSGGSLRLSCAASGFTFSDYNMNWVRQAPGKGLEWISYISSTSSTIYYADAVEGRFTISRDNVKNSLYLHMNSLRDEDTAVYFCASHFGALSYYYYGMDVWGQGTTVTVSS

SEQ ID NO: 10658 - protein, 16 aa, Artificial Sequence
  Synthetic
ASHFGALSYYYYGMDV

SEQ ID NO: 10659 - protein, 107 aa, Artificial Sequence
  Synthetic
DIQMTQSPSSLSASVGDRVTITCRASQSIDSYLNWYQQKSGKAPKLLIYGTSNLQSGVPSRFSGSGSGTDFTLTVSSLQPEDFATYYCQQSYSTPPTFGQGTKVEIK

SEQ ID NO: 10660 - protein, 9 aa, Artificial Sequence
  Synthetic
QQSYSTPPT

SEQ ID NO: 10661 - protein, 129 aa, Artificial Sequence
  Synthetic
EVQLVESGGGLVQPGGSLRLSCATSGFTFSSFWMTWVRQVPGKGLEWVANIKEDGSEKFYVDSVKGRFTISRDNAKNSVYMQMNSVRAEDTAAYYCARMRLGGYCTGGTCKETKWFDSWGQGTLVTVSS

SEQ ID NO: 10662 - protein, 22 aa, Artificial Sequence
  Synthetic
ARMRLGGYCTGGTCKETKWFDS

SEQ ID NO: 10663 - protein, 108 aa, Artificial Sequence
  Synthetic
SYVLTQAPSVSVAPGKTARIICGGNNIGSKSVHWYQQKPGQAPLVVMYYDSDRPSGIPERFSGSNSGNTATLTISRVEAGDEADYYCQVWNNNNEDVFFGGGTTLTVL

SEQ ID NO: 10664 - protein, 11 aa, Artificial Sequence
  Synthetic
QVWNNNNEDVF

SEQ ID NO: 10665 - protein, 128 aa, Artificial Sequence
  Synthetic
QVQLQESGPGLVKPSETLSLTCTVSGGSISSYYWSWIRQPPGKGLEWIGYIYYSGSTNYNPSLKSRVTISVDTSKNQFSLQLSSVTAADTAVYYCARDRPLVPPRQFGEFPYYGMDVWGQGTTVTVSS

SEQ ID NO: 10666 - protein, 22 aa, Artificial Sequence
  Synthetic
ARDRPLVPPRQFGEFPYYGMDV

SEQ ID NO: 10667 - protein, 107 aa, Artificial Sequence
  Synthetic
  misc_feature (9)..(10): Xaa can be any naturally occurring amino acid
DIQMTQSPXXLSASEGDRVTITCRASQSISTYLNWYQQTPGKAPRLLIYAASSLQSGVPSRFSGSGSGTDFTLTISSLQPEDFAAYYCQQTYSSFWTFGQGTKVEIK

SEQ ID NO: 10668 - protein, 9 aa, Artificial Sequence
  Synthetic
QQTYSSFWT

SEQ ID NO: 10669 - protein, 133 aa, Artificial Sequence
  Synthetic
QVQLVQSGAEVKKPGASVRVSCKASGYNLNGHYLHWVRQAPGQGLEWMGWINPNSGGTYYAKHFQGRVTLTRDTSISTANMELRRLRSDDTAVYYCARDKYCSTTTCYPRGENYSYYYGMDVWGQGTTVTVSS

SEQ ID NO: 10670 - protein, 26 aa, Artificial Sequence
  Synthetic
ARDKYCSTTTCYPRGENYSYYYGMDV

SEQ ID NO: 10671 - protein, 110 aa, Artificial Sequence
  Synthetic
QFVLTQPPSASGSPGQSVTISCTGTSSDIGGYNYVSWYQQHPGKAPKLMIYEVSKRPSGVPDRFSGSKSGNTASLTVSGLQAEDEADYYCSSYAGSNNLVFGTGTKVTVL

SEQ ID NO: 10672 - protein, 10 aa, Artificial Sequence
  Synthetic
SSYAGSNNLV

SEQ ID NO: 10673 - protein, 121 aa, Artificial Sequence
  Synthetic
EVQLLESGGGLVQLGGSLRLSCAASGFTFSNFAMNWVRQVPGKGLEWVSGISAGGAGTFYADSVKGRFTISRDNSRNTLYLQMNNLRADDTAVYFCAKDPNWTMVTLFDPWGQGTLVTVSS

SEQ ID NO: 10674 - protein, 14 aa, Artificial Sequence
  Synthetic
AKDPNWTMVTLFDP

SEQ ID NO: 10675 - protein, 108 aa, Artificial Sequence
  Synthetic
DIQMTQSPSSLSASVGDRVTITCRASQRINNYLNWYQQKPGKAPNLLIYAASSLQSGVPSRFSGSGSGTNFTLTISYLQPEDFATYYCQQSYSSFELTFGPGTKVDIK

SEQ ID NO: 10676 - protein, 10 aa, Artificial Sequence
  Synthetic
QQSYSSFELT

SEQ ID NO: 10677 - protein, 124 aa, Artificial Sequence
  Synthetic
QVQLVQSGAEVKKPGASVKVSCKASGYIFTDYYIHWVRQAPGQGLEWMGWINPISGGTNYAQKFQGWVTMARDTSITTVYMELTRLKSDDTAVYYCARAGFFYDSSVPRAFDIWGQGTMVTVSS

SEQ ID NO: 10678 - protein, 17 aa, Artificial Sequence
  Synthetic
ARAGFFYDSSVPRAFDI

SEQ ID NO: 10679 - protein, 110 aa, Artificial Sequence
  Synthetic
QFVLTQPASVSGSPGQSITISCTGTSSDVGGYNFVSWYQHHPGKAPKLIIYEVTNRPSGVSNRFSGSKSGNTASLSISGLQAEDEADYYCLSYTSISTRVFGTGTKVTVL

SEQ ID NO: 10680 - protein, 10 aa, Artificial Sequence
  Synthetic
LSYTSISTRV

SEQ ID NO: 10681 - protein, 119 aa, Artificial Sequence
  Synthetic
QLQLQESGPGLVKPSETLSLTCTVSGGSISSNSYYWGWIRQPPGKGLEWIGSIYYSGSTYYNPSLKSRVTISGDTSKNQFSLKLSSVSVADTAVYYCARGGYSGYFDFWGQGNLVTVSS

SEQ ID NO: 10682 - protein, 11 aa, Artificial Sequence
  Synthetic
ARGGYSGYFDF

SEQ ID NO: 10683 - protein, 107 aa, Artificial Sequence
  Synthetic
DIQMTQSPSTLSASVGDRVTITCRASQSIGTWLAWYQQKPGKAPKLLIYKASSIESGVPSRFSGSGSGTEFTLTISSLQPDDFATYYCQQYNGYSFTFGPGTKVDIK

SEQ ID NO: 10684 - protein, 9 aa, Artificial Sequence
  Synthetic
QQYNGYSFT

SEQ ID NO: 10685 - protein, 126 aa, Artificial Sequence
  Synthetic
QVQLVQSGAEVKKPGSSVKVSCKASGGTFSNSALSWVRQAPGQGLQWMGRVIPIFGTTKYAQKFQGRVTITADKSTTTAYMELSSLRSEDTAVYYCATGQPLTLGYYESSGPCDSWGQGTLVTVSS

SEQ ID NO: 10686 - protein, 19 aa, Artificial Sequence
  Synthetic
ATGQPLTLGYYESSGPCDS

SEQ ID NO: 10687 - protein, 113 aa, Artificial Sequence
  Synthetic
DIVMTQSPDSLAVSLGERATINCKSSQSVLYNSNNKNYLAWYQQKPGQPPKLLIYWASTRESGVPDRFSGSGSGTDFTLTINSLQAEDVAVYYCQQYYSTPPTFGQGTKVEIK

SEQ ID NO: 10688 - protein, 9 aa, Artificial Sequence
  Synthetic
QQYYSTPPT

SEQ ID NO: 10689 - protein, 130 aa, Artificial Sequence
  Synthetic
QVQLVQSGAEVKKPGASVKVSCKASGYTFISYGISWVRQAPGQGLEWMGWISGYNGNINYAEKFQGRVTMTTDTSTSTAYMEMRSLRSDDTAVYYCARDIVVVPTDPPPETYYYYGMDVWGQGTTVTVSS

SEQ ID NO: 10690 - protein, 23 aa, Artificial Sequence
  Synthetic
ARDIVVVPTDPPPETYYYYGMDV

SEQ ID NO: 10691 - protein, 107 aa, Artificial Sequence
  Synthetic
DIQMTQSPSTLSASVGDRVTITCRASQSISRWLAWYQQKPGKVPKLLIYKASSLESGVPSRFSGSGSGTEFTLTISSLQPDDFATYYCQQYNSFSITFGPGTKVDIK

SEQ ID NO: 10692 - protein, 9 aa, Artificial Sequence
  Synthetic
QQYNSFSIT

SEQ ID NO: 10693 - protein, 128 aa, Artificial Sequence
  Synthetic
EVQLVQSGAEVKKPGESLKISCKGSGYSFNSYWIGWVRQIPGKGLEWMGIIFPGDSDTRYSPSFEGQVTLSADKSISTAYLQWSSLKASDTAIYYCARRGGYDVWSGYPAFGNGMDDWGQGTTVTVSS

SEQ ID NO: 10694 - protein, 21 aa, Artificial Sequence
  Synthetic
ARRGGYDVWSGYPAFGNGMDD

SEQ ID NO: 10695 - protein, 112 aa, Artificial Sequence
  Synthetic
DVVMTQSPLSLPVTLGRPASISCRSSQSLVYSDGYTYLNWFQQRPGHSPRRLIYKVSNRDSGVPDRFSGSGSGTDFTLRISKVQAEDVGVYYCMQGTHWPWTFGQGTKVEIK

SEQ ID NO: 10696 - protein, 9 aa, Artificial Sequence
  Synthetic
MQGTHWPWT

SEQ ID NO: 10697 - protein, 130 aa, Artificial Sequence
  Synthetic
QVQLVQSGAEVKKPGDSVKVSCKAFGYMFTNYYMEWVRQAPGQGLEWMGKINPSGASTNYAQKFQGRVSLTRHTSTSTVYMELNSLRFEDTALYYCVRGGVGYDSSGYELFERVHYFDYWGQGTLVTVSS

SEQ ID NO: 10698 - protein, 23 aa, Artificial Sequence
  Synthetic
VRGGVGYDSSGYELFERVHYFDY

SEQ ID NO: 10699 - protein, 107 aa, Artificial Sequence
  Synthetic
EIVMTQSPVSLSVSQGERATLSCRASQSVTSNLAWYQQKPGQAPRLLIYGASTRATDIPARFRGSGSGTEFTLTISGLQSEDFAVYYCQQYNNWPLTFGPGTKVDIK

SEQ ID NO: 10700 - protein, 9 aa, Artificial Sequence
  Synthetic
QQYNNWPLT

SEQ ID NO: 10701 - protein, 122 aa, Artificial Sequence
  Synthetic
QVQLVQSGAEVKKPGASVKVSCKASGYTFTSYYMHWVRQAPGQGLEWMGIINPDGGSTSYAQKFQGRVTMTRDTSTSTVYMELSSLRSEDTALYYCARDIVLIPAAYGMDVWGQGTTVTVSS

SEQ ID NO: 10702 - protein, 15 aa, Artificial Sequence
  Synthetic
ARDIVLIPAAYGMDV

SEQ ID NO: 10703 - protein, 108 aa, Artificial Sequence
  Synthetic
EIVLTQSPATLSLSPGERATLSCRASQSVSSYLAWYQQKPGQAPRLLIYDASNRATGIPARFSGSGSGTDFTLTISSLEPEDFAVYYCQQRNNWPPITFGQGTRLEIK

SEQ ID NO: 10704 - protein, 10 aa, Artificial Sequence
  Synthetic
QQRNNWPPIT

SEQ ID NO: 10705 - protein, 121 aa, Artificial Sequence
  Synthetic
QLQLQESGPGLVKPSETLSLTCTVSRGSIGSSSYYWGWIRQPPGKGLEWIGNIYQSVNTYYNPSLESRVTISVDTSKNLFSLRLSSVTAADTAVYYCARSPLSDFLPFDFWGQGTLVTVSS

SEQ ID NO: 10706 - protein, 13 aa, Artificial Sequence
  Synthetic
ARSPLSDFLPFDF

SEQ ID NO: 10707 - protein, 107 aa, Artificial Sequence
  Synthetic
  misc_feature (9)..(10): Xaa can be any naturally occurring amino acid
DIQMTQSPXXLSASVGDRVTITCRASQSIISYLNWYQQKPGKAPSLLIYAASSLQSGVPSRFSGSGSGTDFTLTISSLQPEDFATYICQQTHSTPYTFGQGTKLEIK

SEQ ID NO: 10708 - protein, 9 aa, Artificial Sequence
  Synthetic
QQTHSTPYT

SEQ ID NO: 10709 - protein, 114 aa, Artificial Sequence
  Synthetic
EVQLVESGGGLVQPGGSLRLSCAVSGFTVSSNYMTWVRQAPGKGLEWVSTIYSGGSTFYADSMKGRFTISRDNSKNTLFLQMNSLRVDDTAVYYCARDTRGWEWGQGTLVTVSS

SEQ ID NO: 10710 - protein, 8 aa, Artificial Sequence
  Synthetic
ARDTRGWE

SEQ ID NO: 10711 - protein, 107 aa, Artificial Sequence
  Synthetic
DIQMTQSPSSLSASVGDRVTITCQASQDISIYLNWYQQKPGKAPTVLIYDASNLQRGVPPRFSGTGSGTHFTLTISSLQPEDIATYYCQQYDNLPVTFGPGTKVDIK

SEQ ID NO: 10712 - protein, 9 aa, Artificial Sequence
  Synthetic
QQYDNLPVT

SEQ ID NO: 10713 - protein, 126 aa, Artificial Sequence
  Synthetic
EVQLVESGGVVVQPGGSLRLSCAASGFIFDDYAMHWVRQAPGKGLEWVSVISWDGGSTYYADSVKGRFTIFRDNSKNSLYLQMNSLRTEDTALYYCTKDNIPGGLVDVGSWWFDPWGQGTLVTVSS

SEQ ID NO: 10714 - protein, 19 aa, Artificial Sequence
  Synthetic
TKDNIPGGLVDVGSWWFDP

SEQ ID NO: 10715 - protein, 112 aa, Artificial Sequence
  Synthetic
QFVLTQPPSVSGAPGQRVTISCTGTSSNLGAGFDVQWYQQLPGTAPKLLISGNSNRPSGVPDRFSGSKSGTSASLAITGLQAEDEADYYCQSYDSSLSGSWVFGGGTKVTVL

SEQ ID NO: 10716 - protein, 12 aa, Artificial Sequence
  Synthetic
QSYDSSLSGSWV

SEQ ID NO: 10717 - protein, 123 aa, Artificial Sequence
  Synthetic
EVQLVESGGGVVQPGGSLRLSCAASGFTFSHYDMHWVRQATGKGLEWVSGIGTSGDRYYADSVKGRVTISREDAKNSLFLQMNGLRAGDTAVYYCARVEHTYGYRSYWYFDLWGRGTLVTVSS

SEQ ID NO: 10718 - protein, 17 aa, Artificial Sequence
  Synthetic
ARVEHTYGYRSYWYFDL

SEQ ID NO: 10719 - protein, 108 aa, Artificial Sequence
  Synthetic
  misc_feature (9)..(9): Xaa can be any naturally occurring amino acid
DIQMTQSPXSLSASIGDRVTITCRASQSITTYLNWYQQKPGRAPKLLIFATSSLHTGVPSRFSGSGSGTDFTLTISSLQPEDFAIYYCQQSYSAPPWTFGPGTKVEIK

SEQ ID NO: 10720 - protein, 10 aa, Artificial Sequence
  Synthetic
QQSYSAPPWT

SEQ ID NO: 10721 - protein, 120 aa, Artificial Sequence
  Synthetic
EVQLVESGGGLVQPGGSLRLSCAASGFTFSSYDMHWVRQPTGKGLEWVSAIGTSGDTYYADSVKGRFTISRENAKNSLHLQMNSLRAGDTAVYFCVRAVGISDDYRFDYWGQGTLVTVSS

SEQ ID NO: 10722 - protein, 14 aa, Artificial Sequence
  Synthetic
VRAVGISDDYRFDY

SEQ ID NO: 10723 - protein, 108 aa, Artificial Sequence
  Synthetic
DIQMTQSPVSLSASVGDRVTITCRASQSIRKFLNWYQQKPGKAPKLLIYSASSLQSGVPSRFSGSGSGTDFTLTISSLQPEDFGTYSCQQSYSMPPWTFGQGTRVEIK

SEQ ID NO: 10724 - protein, 10 aa, Artificial Sequence
  Synthetic
QQSYSMPPWT

SEQ ID NO: 10725 - protein, 123 aa, Artificial Sequence
  Synthetic
EVQLVESGGFVVQPGGSLRLSCAASGFIFDDYTMHWVRQTPGKALEWVSLFGWDGATTYYADSVEGRFTISRDNSKNSLYLQMSSLRTEDTALYYCAKARQQLGPRGDAFDIWGQGTMVTVSS

SEQ ID NO: 10726 - protein, 16 aa, Artificial Sequence
  Synthetic
AKARQQLGPRGDAFDI

SEQ ID NO: 10727 - protein, 112 aa, Artificial Sequence
  Synthetic
  misc_feature (9)..(10): Xaa can be any naturally occurring amino acid
DIVMTQTPXXLSVTPGQPASISCKSSQSLLHSDGKTSLYWYLQRPGQSPQLLIYAVSSRFSGVPARFSGSGSGTDFTLKISRVEAEDVGVYYCMQGIHLPLTFGGGTKVEIK

SEQ ID NO: 10728 - protein, 9 aa, Artificial Sequence
  Synthetic
MQGIHLPLT

SEQ ID NO: 10729 - protein, 126 aa, Artificial Sequence
  Synthetic
QVQLVQSGAEVKKPGSSVKVSCKASGGTFSSSAISWVRQAPGQGLEWMGGIIPIFGSSNYAQKFQGRVTITADKSTSTAYMELSSLRSEDTAVYYCAMKNYDFWSGYGNFYGMDVWGQGTTVTVSS

SEQ ID NO: 10730 - protein, 19 aa, Artificial Sequence
  Synthetic
AMKNYDFWSGYGNFYGMDV

SEQ ID NO: 10731 - protein, 112 aa, Artificial Sequence
  Synthetic
QFVLTQPASVSGSPGQSITISCTGTSSDVGGYNYVSWYQQHPGKAPKLLIYDVSNRPSGVSNRFSGSKSGNTASLTISGLQAEDEADYYCSSYTSSSSLFVVFGGGTKLTVL

SEQ ID NO: 10732 - protein, 12 aa, Artificial Sequence
  Synthetic
SSYTSSSSLFVV

SEQ ID NO: 10733 - protein, 116 aa, Artificial Sequence
  Synthetic
QVQLQESGPGLVKPSGTLSLTCAVSGGSISGSHWWSWVRQPPGKGLEWIGEIFHSGNTKYNPSLKSRVTISVDKSKNQISLNLRSVTAADTAVYYCARVMGLFDYWGQGTLVTVSS

SEQ ID NO: 10734 - protein, 9 aa, Artificial Sequence
  Synthetic
ARVMGLFDY

SEQ ID NO: 10735 - protein, 107 aa, Artificial Sequence
  Synthetic
DIQMTQSPSSLSASVGDRVTITCRASQAISNSLAWYQQKPGKAPMLLLYAASTLESGVPSRFSGSGSGTDYTLTISSLQPEDFATYYCQQYYSTVRTFGQGTKLEIK

SEQ ID NO: 10736 - protein, 9 aa, Artificial Sequence
  Synthetic
QQYYSTVRT

SEQ ID NO: 10737 - protein, 122 aa, Artificial Sequence
  Synthetic
EVQLLESGGGLVQPGGSLRLSCVVSGFTFSSYAMSWVRQAPGKGLEWVSGISAGGDIRYYAESVKGRFTISRDNSKNTMYLEMDSLRAEDSALYYCGKDSGTAFGVLIETYWGQGTLVTVSS

SEQ ID NO: 10738 - protein, 15 aa, Artificial Sequence
  Synthetic
GKDSGTAFGVLIETY

SEQ ID NO: 10739 - protein, 106 aa, Artificial Sequence
  Synthetic
DIQMTQSPSSLSASVGDRVTITCRTSQIINSFLNWYQQKPGKAPKLLIYAASSLQSGVPSRFSGSGSGTDFTLTISSLQPEDFATYYCQQSYTTPPTFGPGTKVDI

SEQ ID NO: 10740 - protein, 9 aa, Artificial Sequence
  Synthetic
QQSYTTPPT

SEQ ID NO: 10741 - protein, 133 aa, Artificial Sequence
  Synthetic
QVQLVESGGGVVQPGRSLRLSCAASGFTFSNYGIHWVRQAPGKGLEWVAVIWYDGSNKKYADSVKGRFTISRDNSKNTVYLEMNSLRVEDTAVYYCARASGINYYDRSGNYNVDYYHYGMDVWGLGTTVTVSS

SEQ ID NO: 10742 - protein, 26 aa, Artificial Sequence
  Synthetic
ARASGINYYDRSGNYNVDYYHYGMDV

SEQ ID NO: 10743 - protein, 111 aa, Artificial Sequence
  Synthetic
QFVLTQPPSVSGAPGQRVTFSCTGSSANIGAGYDVHWYQQLPGTAPKLLIYGNSNRPSGVPDRFFASSSGTSGSLAITGLQAEDEADYYCQSYDSSLSAWVFGGGTKLTVL

SEQ ID NO: 10744 - protein, 11 aa, Artificial Sequence
  Synthetic
QSYDSSLSAWV

SEQ ID NO: 10745 - protein, 123 aa, Artificial Sequence
  Synthetic
QVQLVESGGGVVRPERSLRLSCAASGFTFSNYGLHWVRQAPGKGLEWVAFISYDGSDKNSADSVKGRFTISRDNSKNTVYLQMNRLRTEDTALYYCAKTQYSYAYSVYYFDYWGQGTLVTVSS

SEQ ID NO: 10746 - protein, 16 aa, Artificial Sequence
  Synthetic
AKTQYSYAYSVYYFDY

SEQ ID NO: 10747 - protein, 112 aa, Artificial Sequence
  Synthetic
NFMLTQPHSVSESPGKTVTISCTRSSGSIAINYVQWYQQRPGSSPNIVIYENDQRPFGVPDRFSGSIDSSSNSASLTISGLKTEDEADYYCQSYDSSNGDVLFGGGTKLTVL

SEQ ID NO: 10748 - protein, 11 aa, Artificial Sequence
  Synthetic
QSYDSSNGDVL

SEQ ID NO: 10749 - protein, 127 aa, Artificial Sequence
  Synthetic
QVQLVESGGGVVQPGRSLRLSCAASGFTFSSYGMHWVRQAPGKGLEWVAALSYDGSYKDYAESVKGRFTISRDNSKNTLYLQMNSPRVEDTAVYYCAKGRGTYCSGGNCYSHYFDYWGQGALVTVSS

SEQ ID NO: 10750 - protein, 20 aa, Artificial Sequence
  Synthetic
AKGRGTYCSGGNCYSHYFDY

SEQ ID NO: 10751 - protein, 108 aa, Artificial Sequence
  Synthetic
EIVLTQSPATLSLSPGERATLSCRASQSVSSFLAWYQQKPGQAPRLLIYDASNRATGIPARFSGSGSGTDFTLTISSLEPEDFAVYYCQQRSNWPPVTFGQGTRLEIK

SEQ ID NO: 10752 - protein, 10 aa, Artificial Sequence
  Synthetic
QQRSNWPPVT

SEQ ID NO: 10753 - protein, 125 aa, Artificial Sequence
  Synthetic
QVQLQESGPGLVKPSGTLSLTCAVSGGSIINTNWWSWVRQPPGKGLEWIGEIYHNGNTNYNPSLKSRVTISVDKSKNQFSLKLSSVTAADTAVYYCATLPLLGPGSSSSSVEDYWGQGTLVTVSS

SEQ ID NO: 10754 - protein, 18 aa, Artificial Sequence
  Synthetic
ATLPLLGPGSSSSSVEDY

SEQ ID NO: 10755 - protein, 110 aa, Artificial Sequence
  Synthetic
QSVLTQPASVSGSPGQSISISCTGTSSDVGGYNYVSWYQQLPGKAPKLMIYDVSNRPSGVSDRFSGSKSGNTASLTISGLQAEDEADYYCGSYTSSSIPLFGGGTKLTVL

SEQ ID NO: 10756 - protein, 10 aa, Artificial Sequence
  Synthetic
GSYTSSSIPL

SEQ ID NO: 10757 - protein, 128 aa, Artificial Sequence
  Synthetic
QVQLVQSGAAVKKPGASVKVACQASGYTLTAFYLHWVRQAPGHGLEWMGWINPNSGDTNSAQKFQGRATMTRDTSISTAYLELSSLRFDDTAVYYCARDQRNRLLDPRRGGKYGMDVWGQGTTITVSS

SEQ ID NO: 10758 - protein, 21 aa, Artificial Sequence
  Synthetic
ARDQRNRLLDPRRGGKYGMDV

SEQ ID NO: 10759 - protein, 110 aa, Artificial Sequence
  Synthetic
QSVLTQSPSVSAAPGQKVTISCSGSSSNIGNNYVSWYQHLPGTAPKLLIYDNNKRPSGIPDRFSGSRSGTSATLGITGLQTGDEADYYCGTWDSSLSAVVFGGGTKLTVL

SEQ ID NO: 10760 - protein, 11 aa, Artificial Sequence
  Synthetic
GTWDSSLSAVV

SEQ ID NO: 10761 - protein, 126 aa, Artificial Sequence
  Synthetic
EVQLLESGGGLGQPGGSLRLSCAASGFAFSRYAMSWVRQAPGKGLEWVSSISGGADSTYYADAVKGRFTLSRDNSKNTVYLQVNSLRDEDTALYYCAKGGIGCSGESCYLNWFDPWGQGTLVTVSS

SEQ ID NO: 10762 - protein, 19 aa, Artificial Sequence
  Synthetic
AKGGIGCSGESCYLNWFDP

SEQ ID NO: 10763 - protein, 107 aa, Artificial Sequence
  Synthetic
DIQMTQSPVSLSASVGDRVTITCRASQSISGYLNWYQQKPGKAPRLLIYAASSLHSGVPSRFSGSGSGTDFTLTISSLQPEDFATYYCQQSYTVLWTFGQGTRVEIK

SEQ ID NO: 10764 - protein, 9 aa, Artificial Sequence
  Synthetic
QQSYTVLWT

SEQ ID NO: 10765 - protein, 115 aa, Artificial Sequence
  Synthetic
QVQLVESGGGVVQPGRSLRLSCAASGFTFSNSGMHWVRQAPGKGLEWMAVIWDDGSGKHYAESVKGRFTISRDNSKNTLYLQMNSLRAEDTAVYYCARDFGRTQWLVTWFDPWGQ

SEQ ID NO: 10766 - protein, 16 aa, Artificial Sequence
  Synthetic
ARDFGRTQWLVTWFDP

SEQ ID NO: 10767 - protein, 108 aa, Artificial Sequence
  Synthetic
DIQMTQSPSSLSASIGDRVTITCRASQGINIYLNWYQQKPGKAPKLLIYGASNLESGVPSRFSGSGSGTDFTLTISSLQPEDFATYYCQQSYNTPPWTFGQGTRVEIK

SEQ ID NO: 10768 - protein, 10 aa, Artificial Sequence
  Synthetic
QQSYNTPPWT

SEQ ID NO: 10769 - protein, 122 aa, Artificial Sequence
  Synthetic
EVQLVESGGGIVQPGGSLRLSCAASGFTFSIYDMHWVRQATGKGLEWVSTIGTSADTYYPDSVKGRFTISRENAKNSLYLHMNSLRAGDTAVYYCARASYDSRNLRYWFDYWGQGTLVTVSS

SEQ ID NO: 10770 - protein, 16 aa, Artificial Sequence
  Synthetic
ARASYDSRNLRYWFDY

SEQ ID NO: 10771 - protein, 108 aa, Artificial Sequence
  Synthetic
DIQMTQSPSSLSASIGDRVTITCRASQSISTYLNWYQQKPGKAPKLLIYTASSLQSGVPSRFSGSGSGTDFTLTIISLQPEDFATYYCQQTYNTPPITFGQGTRLEIK

SEQ ID NO: 10772 - protein, 10 aa, Artificial Sequence
  Synthetic
QQTYNTPPIT

SEQ ID NO: 10773 - protein, 128 aa, Artificial Sequence
  Synthetic
QVQLVESGGGVVQPGRSLRLSCAGSQFIFRDYGMHWVRQVPGKGLEWVAFISYDESHKYYADSVKGRFIISRDNSKNTLYLQMNSLRPEDTAVYYCAKDSAPPLWFGDLRYYYGMDVRGQGTTVTVSS

SEQ ID NO: 10774 - protein, 21 aa, Artificial Sequence
  Synthetic
AKDSAPPLWFGDLRYYYGMDV

SEQ ID NO: 10775 - protein, 107 aa, Artificial Sequence
  Synthetic
DIQMTQSPSTLSASVGDRVTITCRASHSISSWLAWYQQKPGKAPKVLIYKASSLESEVPSRFSGSGSGTDFTLTISSLQPDDFATYYCQQYNSYPYTFGQGTKLEIK

SEQ ID NO: 10776 - protein, 9 aa, Artificial Sequence
  Synthetic
QQYNSYPYT

SEQ ID NO: 10777 - protein, 130 aa, Artificial Sequence
  Synthetic
QVQLVQSGAEVKTPGSSVKVSCKASGGSFSNYAFNWVRQAPGQGLEWMGGIIPLLGPANYAQKFQDRVSITADRSTTTAYMELSSLRSEDTAVYYCARETLQHDDVWGRFSRHYYGMDVWGQGTTVTVSS

SEQ ID NO: 10778 - protein, 23 aa, Artificial Sequence
  Synthetic
ARETLQHDDVWGRFSRHYYGMDV

SEQ ID NO: 10779 - protein, 106 aa, Artificial Sequence
  Synthetic
DIQLTQSPSFLSASVGDRVIITCRASQDISSYLAWYQHTPGKAPKLLIYAASTLQSGVPSRFSGSGSGTEFTLTISSLQPEDFATYYCQELSSHLTFGGGTKVEIK

SEQ ID NO: 10780 - protein, 8 aa, Artificial Sequence
  Synthetic
QELSSHLT

SEQ ID NO: 10781 - protein, 123 aa, Artificial Sequence
  Synthetic
EVQLVESGGGLAQPGRSLRLSCAASGFSFDDYAMYWVRQAPGKGLEWVSGISRNSGSISYADSVKGRFTISRDNAKKSLYLQMNSLRAEDTALYYCAKGGGISGTYLGYFHYWGQGTLVTVSS

SEQ ID NO: 10782 - protein, 16 aa, Artificial Sequence
  Synthetic
AKGGGISGTYLGYFHY

SEQ ID NO: 10783 - protein, 111 aa, Artificial Sequence
  Synthetic
NFMLTQPHSVSESPGKTVTISCTRSSGDIASNYVQWYQQRPGSSPTTVIYEDNQRPSGVPDRFSGSIDSSSNSASLTISGLKTEDEADYYCQSYDVSKPWVFGGGTKLTVL

SEQ ID NO: 10784 - protein, 10 aa, Artificial Sequence
  Synthetic
QSYDVSKPWV

SEQ ID NO: 10785 - protein, 122 aa, Artificial Sequence
  Synthetic
QVQLQESGPGLVKPSQTLSLTCSVSGGFISSGSYYWTWIRQPAGKGLEWIGHIYSSGSTNYSPSLKSRVTISLDTSKNQFSLKLRSVTAADTAVYYCARDVEVVIGHPIDYWGQGTLVTVSS

SEQ ID NO: 10786 - protein, 14 aa, Artificial Sequence
  Synthetic
ARDVEVVIGHPIDY

SEQ ID NO: 10787 - protein, 107 aa, Artificial Sequence
  Synthetic
DIQMTQSPSSLSASVGDRVTITCRASQSISSYLNWYQQKPGKAPELLIYGALSLQSGVPSRFSGSGSGTDFTLTISSLQPEDFATYYCQQSYGFPYTFGQGTKLEIK

SEQ ID NO: 10788 - protein, 9 aa, Artificial Sequence
  Synthetic
QQSYGFPYT

SEQ ID NO: 10789 - protein, 127 aa, Artificial Sequence
  Synthetic
EVQLVQSGAEVKKPGESLKISCKGSGYSFSYYWIGWVRQMPGKGLEWMGIIYPGDSDTTYSPSFQGQVTISADKSISTAYLQWSSLKASDTAMYYCALGSYCINTSCYGSRHAFGIWGQGTMITTSS

SEQ ID NO: 10790 - protein, 20 aa, Artificial Sequence
  Synthetic
ALGSYCINTSCYGSRHAFGI

SEQ ID NO: 10791 - protein, 110 aa, Artificial Sequence
  Synthetic
QSVLTQPPSASGTPGQRVTISCSGSSSNIGSNAVNWYQQLPGTAPKLLIYTNNQRPSGVPDRFSGSKSGTSASLAISGLQSEDEADYYCAAWDDSLNGYVFGSGTKVTVL

SEQ ID NO: 10792 - protein, 11 aa, Artificial Sequence
  Synthetic
AAWDDSLNGYV

SEQ ID NO: 10793 - protein, 125 aa, Artificial Sequence
  Synthetic
QVQLVQSGAEMKKPGSSVKVSCKASGGTFSSYSVSWVRQAPGQGLEWLGRIIPMLGVPNYAQNFQDRVTITADKSTSTAYMELSSLRSEDTAMYYCAREGYYDSSSLAVEYFQHWGQGTLVTVSS

SEQ ID NO: 10794 - protein, 18 aa, Artificial Sequence
  Synthetic
AREGYYDSSSLAVEYFQH

SEQ ID NO: 10795 - protein, 111 aa, Artificial Sequence
  Synthetic
QSVLTQPPSVSGAPGQRVAISCTGSNSNIGAGYDVHWYQQLPGTAPKLLIYGNNNRPSGVPDRFSGSNSGTSASLAITGLRAEDEADYYCQSYDSSLSGSVFGGGTKLTVV

SEQ ID NO: 10796 - protein, 11 aa, Artificial Sequence
  Synthetic
QSYDSSLSGSV

SEQ ID NO: 10797 - protein, 127 aa, Artificial Sequence
  Synthetic
EVQLVESGGGVVRPGESLRLSCAASGFTSDDYGMSWVRQVPGKGLEWVSGVNIYDGNTGYADSVKGRFTISRDNAKNSLYLEMNSLRAEDTALYYCARDNKVYDVVLLSAFGAFDIWGQGTMVTVSS

SEQ ID NO: 10798 - protein, 20 aa, Artificial Sequence
  Synthetic
ARDNKVYDVVLLSAFGAFDI

SEQ ID NO: 10799 - protein, 113 aa, Artificial Sequence
  Synthetic
QSVLTQPASVSGSPGQSITISCTGTSSDVGGYNLVSWYQQHPGKAPKLIVYEVNKRPSGVSNRFSGSKSGNTASLTISGLQAEDEADYFCCSYAGTTTSELYVFGTGTRVTVL

SEQ ID NO: 10800 - protein, 13 aa, Artificial Sequence
  Synthetic
CSYAGTTTSELYV

SEQ ID NO: 10801 - protein, 124 aa, Artificial Sequence
  Synthetic
  misc_feature (45)..(45): Xaa can be any naturally occurring amino acid
QVQLVESGGGVMQPGRSLRLSCAASGFTFSNYCIHWVHQAPGKGXEWVAVISYDGSNKYYADSVKGRFTISRDNSKNTLYLQMNSLRAEDTAVYYCALIPGQYYDFWSGPFDYWGQGTLVTVSS

SEQ ID NO: 10802 - protein, 17 aa, Artificial Sequence
  Synthetic
ALIPGQYYDFWSGPFDY

SEQ ID NO: 10803 - protein, 108 aa, Artificial Sequence
  Synthetic
SYVLTQPPSVSVAPRKTAKITCEGNNIGSKNVHWYQQKPGQAPVMVMYYDSDRPSGIPERFSGTKSGNTATLTISRVEAGDEADYYCQVWDSNNDHEVFGGGTKLTVL

SEQ ID NO: 10804 - protein, 11 aa, Artificial Sequence
  Synthetic
QVWDSNNDHEV

SEQ ID NO: 10805 - protein, 123 aa, Artificial Sequence
  Synthetic
QVQLVQSGAEVKKPGASVKVSCKASGYTFTNFYMHWVRQAPGQGLEWMGIINPSGGSTSYTQKFQGRVTMTSDTSTSTVYMELSSLRSDDTAVYYCARDTERIPAATSYFDYWGQGTLVTVSS

SEQ ID NO: 10806 - protein, 16 aa, Artificial Sequence
  Synthetic
ARDTERIPAATSYFDY

SEQ ID NO: 10807 - protein, 107 aa, Artificial Sequence
  Synthetic
DIQMTQSPSTLSASVGDRVTITCRASQSISSWLAWYQQKPGKAPKVLIYKASTLESGVPSRFSGSGSGTEFTLTISSLQPDDFATYYCQQYNGYSRTFGQGTKVEIK

SEQ ID NO: 10808 - protein, 9 aa, Artificial Sequence
  Synthetic
QQYNGYSRT

SEQ ID NO: 10809 - protein, 121 aa, Artificial Sequence
  Synthetic
QVQLVESGGGVVQPGRSLRLSCVASGFTFSTYGMHWVRQAPGKGLEWVTVILYDGSDKYYADSVKGRFTISRDNSKNTVYLQMNNLRTEDTAVYYCAKAGLYGDYVRLDFWGQGTLVTVSS

SEQ ID NO: 10810 - protein, 14 aa, Artificial Sequence
  Synthetic
AKAGLYGDYVRLDF

SEQ ID NO: 10811 - protein, 107 aa, Artificial Sequence
  Synthetic
DIQMTQSPSSLSASVGDRVTITCQASHDIRYYLNWYQQKPGKVPRLLIYDAANLETGVPSRFSGSGSGTDFTFTISSLQPEDIATYYCQQYYTLPLLFGGGTKVEIK

SEQ ID NO: 10812 - protein, 9 aa, Artificial Sequence
  Synthetic
QQYYTLPLL

SEQ ID NO: 10813 - protein, 127 aa, Artificial Sequence
  Synthetic
EVQLVESGGGLVQPGGSLRLSCAASGFTFSTYWMTWVRQAPGKGLEWVANIKQDGSEKYYVDSVKGRFTISRDNAKKSLYLQMNSLRAEDTAVYYCARVAATDVHVLLWFGEFFDYWGQGTLVTVSS

SEQ ID NO: 10814 - protein, 20 aa, Artificial Sequence
  Synthetic
ARVAATDVHVLLWFGEFFDY

SEQ ID NO: 10815 - protein, 108 aa, Artificial Sequence
  Synthetic
SYVLTQPPSVSVSPGQTARITCSGDAFPNQYAHWYQQKPGQAPVVVICKDTERPSGIPERFSGSSSGTTVTLTISGVQAEDEADYHCQSADSSGTNVIFGGGTKLTVV

SEQ ID NO: 10816 - protein, 11 aa, Artificial Sequence
  Synthetic
QSADSSGTNVI

SEQ ID NO: 10817 - protein, 125 aa, Artificial Sequence
  Synthetic
QVQLVQSGAEVKKPGSSVKVSCKASGGIFSSYGISWVRQAPGQGLEWLGGIIPAFGTTNYAQKFQGRVTIIADESSSTVYMGLSGLRSEDTALYYCASGPLEHYFESSGYPYDYWGQGTLVTVSS

SEQ ID NO: 10818 - protein, 18 aa, Artificial Sequence
  Synthetic
ASGPLEHYFESSGYPYDY

SEQ ID NO: 10819 - protein, 108 aa, Artificial Sequence
  Synthetic
EIVLTQSPGTLSLSPGERATLSCRASQSVTSSFLAWYQQKPGQAPRLLIYGASSRASGIPDRFSGSGSGTDFTLTISRLEPEDFAVYYCQQYDSSPPTFGQGTKVDLK

SEQ ID NO: 10820 - protein, 9 aa, Artificial Sequence
  Synthetic
QQYDSSPPT

SEQ ID NO: 10821 - protein, 131 aa, Artificial Sequence
  Synthetic
QVQLVQSGAEVKKPGSSVKVSCKASGGTFSSYAISWVRQAPGQGLEWMGGIIPIFVTPNYAQKFQGRVTITADKSTNTVYMELSSLRSEDTALYYCARGYPNDFWRRPDPNSNYYYGVDAWGQGTTVTVSS

SEQ ID NO: 10822 - protein, 24 aa, Artificial Sequence
  Synthetic
ARGYPNDFWRRPDPNSNYYYGVDA

SEQ ID NO: 10823 - protein, 110 aa, Artificial Sequence
  Synthetic
QSVLTQETSLTVSPGGTVTLTCGSSTGAVTSGHYPYWFQQKPGQAPKTLIYETSNKHSWTPARFSGSLLGGKAALTLSGAQPDDEADYYCSLSYSGPYVVIGGGTKLTVL

SEQ ID NO: 10824 - protein, 10 aa, Artificial Sequence
  Synthetic
SLSYSGPYVV

SEQ ID NO: 10825 - protein, 127 aa, Artificial Sequence
  Synthetic
QVQLVQSGAEVKKPGASVKVSCRASGYTFNSYEVNWVRQAPGQGLEWMGWMHPNTGNTGYAQEFQGRVTMTTNTSISTAYLELSSLRSEDTAVYYCARGGDILTGYYNYYYYGIDVWGQGTTVTVSS

SEQ ID NO: 10826 - protein, 20 aa, Artificial Sequence
  Synthetic
ARGGDILTGYYNYYYYGIDV

SEQ ID NO: 10827 - protein, 112 aa, Artificial Sequence
  Synthetic
QSVLTQPPSVSGAPGQRVSISCTGSSSNIGAGYDVHWYQQLPGKAPKLLINGNTNRPSGVPARFSGSKSGTSASLAITGLQAEDEADYYCQSYDTSLSGSGVFGTGTKVTVL

SEQ ID NO: 10828 - protein, 12 aa, Artificial Sequence
  Synthetic
QSYDTSLSGSGV

SEQ ID NO: 10829 - protein, 124 aa, Artificial Sequence
  Synthetic
EVQLVESGGGLIQPGGSLRLSCAASGVTVSTYYMSWVRQAPGKGLEWVSVIYSGGSTNYADSVKGRFTISRDNSKNTLYLQMKSLRAEDTAVYYCATGNIVIMPPAHGYYFDCWGQGTLVTVAS

SEQ ID NO: 10830 - protein, 18 aa, Artificial Sequence
  Synthetic
ATGNIVIMPPAHGYYFDC

SEQ ID NO: 10831 - protein, 106 aa, Artificial Sequence
  Synthetic
DIQMTQSPSTLSASVGDRVTITCRASQSISSWLAWYQQKPGKAPKLLIYKASYLESGVPSRFSGSGSGTEFTLTISSLQPDDFATYYCQQYNTYSGFGPGTKVDMK

SEQ ID NO: 10832 - protein, 8 aa, Artificial Sequence
  Synthetic
QQYNTYSG

SEQ ID NO: 10833 - protein, 121 aa, Artificial Sequence
  Synthetic
QLQLQESGPGLVKPSETLSLTCTVSGGSISSSSYFWGWIRQPPGKGLEWIGSIRYSVTTSYNPSLESRVILSVDTSKNQLSLKLSSVTAADTAVYYCARSPLSDFLPFDYWGQGTLVTVSS

SEQ ID NO: 10834 - protein, 13 aa, Artificial Sequence
  Synthetic
ARSPLSDFLPFDY

SEQ ID NO: 10835 - protein, 107 aa, Artificial Sequence
  Synthetic
DIQMTQSPSSLSASVGDRVTITCRASQNINTYLNWYQHNPGKAPKLLIYAASSLQSGVPSRFSGSGSGTDFTLTISSLQPEDFATYSCQQTYITPYTFGQGTKLEIK

SEQ ID NO: 10836 - protein, 9 aa, Artificial Sequence
  Synthetic
QQTYITPYT

SEQ ID NO: 10837 - protein, 120 aa, Artificial Sequence
  Synthetic
  misc_feature (116)..(116): Xaa can be any naturally occurring amino acid
QVQLVESGGGVVQPGRSLRLSCAASGFTFSTYAMHWVRQAPGKGLEWVAVMSYDESYKDYADSVKGRFTISRDNSKNTMYLQMNSLRAEDTAVYYCARDFGFMVTWLDYWGQGTLXTVSS

SEQ ID NO: 10838 - protein, 13 aa, Artificial Sequence
  Synthetic
ARDFGFMVTWLDY

SEQ ID NO: 10839 - protein, 108 aa, Artificial Sequence
  Synthetic
DIQMTQSPSSLSASVGDRVTITCRASQSINNYLNWYQQKPGKAPKLLIYTTSSLQSGVPSRFSGSGSGTYFTLTISSLQPEDFATYYCQQSYSTPPWTFGQGTKVEIK

SEQ ID NO: 10840 - protein, 10 aa, Artificial Sequence
  Synthetic
QQSYSTPPWT

SEQ ID NO: 10841 - protein, 122 aa, Artificial Sequence
  Synthetic
QVQLVESGGGVVQPGRSLRLSCAASGFNFTHYGMHWVRQAPGKGLEWVAVISYDGSDQYADSVKGRFTISRDTSRNTLYLQMNSLRGDDTAVYYCAKTVAPYYYYYYGMDVWGQGTTVTVSS

SEQ ID NO: 10842 - protein, 16 aa, Artificial Sequence
  Synthetic
AKTVAPYYYYYYGMDV

SEQ ID NO: 10843 - protein, 111 aa, Artificial Sequence
  Synthetic
QSVLTQPASVSGSPGQSITISCTGTSSDVGGYNYVSWYQQHPGKAPQLLIYEVSDRPSGVSNRFSGSKSGNTASLSISGLQAEDEADYYCSSYTTGSTLWVFGGGTKVTVL

SEQ ID NO: 10844 - protein, 11 aa, Artificial Sequence
  Synthetic
SSYTTGSTLWV

SEQ ID NO: 10845 - protein, 125 aa, Artificial Sequence
  Synthetic
QVQLVQSGAEVKKPGASVKVSCKASEYTFTSYDLNWVRQATGQGLEWMGWVNPNSGNTGYAQKFQGRVTITRNTSISTAYMELSSLRYEDTAVYYCARGVPSSWFSRNFYGLDVWGQGTTVTVSS

SEQ ID NO: 10846 - protein, 18 aa, Artificial Sequence
  Synthetic
ARGVPSSWFSRNFYGLDV

SEQ ID NO: 10847 - protein, 109 aa, Artificial Sequence
  Synthetic
QSVLTQPPSASGTPGQRVTISCSGSSSNVGNNYVYWYQQLPGAAPKLLIYRNNERPSGVPDRFSGSKSGTSASLAISGLRSEDEADYYCAAWDDSLTGVVFGGGTKVTV

SEQ ID NO: 10848 - protein, 11 aa, Artificial Sequence
  Synthetic
AAWDDSLTGVV

SEQ ID NO: 10849 - protein, 119 aa, Artificial Sequence
  Synthetic
QVQLVQSGAEVKKPGASVKVSCKASGYTFSNSYIHWVRQAPGQGLEWLGEINPGGYITSNTHKFQGRVTMTRDTSTTTVYMELSSLRSEDTAVYFCARGRGSTNWLYYWGQGTLVTVSS

SEQ ID NO: 10850 - protein, 12 aa, Artificial Sequence
  Synthetic
ARGRGSTNWLYY

SEQ ID NO: 10851 - protein, 107 aa, Artificial Sequence
  Synthetic
DIQMTQSPSSLSASVGDRVTITCQASQDIYNYLNWYQQKPGKAPKLLIFDASNLETGVPSRFSGSGSGTDFTFTISSLQPEDIATYYCQQYDNLPITFGQGTRLDIK

SEQ ID NO: 10852 - protein, 9 aa, Artificial Sequence
  Synthetic
QQYDNLPIT

SEQ ID NO: 10853 - protein, 122 aa, Artificial Sequence
  Synthetic
EVQLLESGGGLVQPGGSLRLSCAASRFTFSNYAMSWVRQAPGMGLEWVSGISSSGDITYYADSVKGRFTISRDNSKNTLYLQMNSLRAEDTALYFCGKDIGTSFGVLIETYWGQGTLVTVSS

SEQ ID NO: 10854 - protein, 15 aa, Artificial Sequence
  Synthetic
GKDIGTSFGVLIETY

SEQ ID NO: 10855 - protein, 107 aa, Artificial Sequence
  Synthetic
DIQMTQSPSSLSASEGDRVTIACRASLSVGRYLNWYQQKAGKAPKLLIYAASSLQSGVPPRFSGSGSGTDFTLTISSLQPEDFATYYCQQSYTTPPTFGPGTRVDTK

SEQ ID NO: 10856 - protein, 9 aa, Artificial Sequence
  Synthetic
QQSYTTPPT

SEQ ID NO: 10857 - protein, 125 aa, Artificial Sequence
  Synthetic
QVQLVQSGAEVKKPGASVKVSCKTPEYIFTRYALHWVRQAPGQRLEWMGWINAGNGSTKYSQKFQGRVTITRDTSASTAYLALSSLRSEDTALYYCAGGEYCSSVNCYHSWFDPWGQGTLVTVSS

SEQ ID NO: 10858 - protein, 18 aa, Artificial Sequence
  Synthetic
AGGEYCSSVNCYHSWFDP

SEQ ID NO: 10859 - protein, 111 aa, Artificial Sequence
  Synthetic
QSVLTQPPSVSGAPGQRITISCTGSSSNIGAGYDVHWYQQLPGTAPKLLIYVNSNRPSGVPDRFSGSKSGTSASLAITGLQAEDEADYYCQSFDSSLSGYVFGTGTKVTVL

SEQ ID NO: 10860 - protein, 11 aa, Artificial Sequence
  Synthetic
QSFDSSLSGYV

SEQ ID NO: 10861 - protein, 119 aa, Artificial Sequence
  Synthetic
EVQLVESGGGLVQPGGSLRLSCAASGFTFSDYDMHWVRQTAGEGLEWVSTVGTSGDTYYADSVKGRFTISRENAKNSLFLQMTSLRAGDTAVYYCARAKDGFHWYFDLWGRGTLVSVSS

SEQ ID NO: 10862 - protein, 13 aa, Artificial Sequence
  Synthetic
ARAKDGFHWYFDL

SEQ ID NO: 10863 - protein, 108 aa, Artificial Sequence
  Synthetic
DIQMTQSPATLSASVGDRVTITCRASQKIHSYLNWYQQKPGKAPKLLIYTTSSLQGGVPSRFSGSGSGTDFTLTISNLQPEDFATYYCQQTYSTPPITFGQGTRLEIK

SEQ ID NO: 10864 - protein, 10 aa, Artificial Sequence
  Synthetic
QQTYSTPPIT

SEQ ID NO: 10865 - protein, 121 aa, Artificial Sequence
  Synthetic
EVQLVESGGGLVQPGRSLRLSCAASGFTFDDYAMHWVRQAPGKGLEWVAGISWNSDSIGYGDSVKGRFTISRDNAKNSLYLQMNSLKTEDTALYYCAKAALSDWTEHIDFWGQGSLVTVSS

SEQ ID NO: 10866 - protein, 14 aa, Artificial Sequence
  Synthetic
AKAALSDWTEHIDF

SEQ ID NO: 10867 - protein, 108 aa, Artificial Sequence
  Synthetic
SYVLTQSPSVSVAPGKTAEVTCGGDNIGTKSVHWYQQKPGQAPILVIFYDGDRPSGIPERFSGSNSGNTATLTISRVEAGDEADYYCQVWDTGRNPVVFGGGTKLTVL

SEQ ID NO: 10868 - protein, 11 aa, Artificial Sequence
  Synthetic
QVWDTGRNPVV

SEQ ID NO: 10869 - protein, 121 aa, Artificial Sequence
  Synthetic
QVQLVQSGAEVKKPGSSVTVSCKASGGTFSSYTITWVRQAPGQGLEWMGSIIPILGIPNYAERLQGRVTITADKSTSTAYMELSSLRSEDTAIYYCARVITPRGHDAFDMWGQGTMVTVSS

SEQ ID NO: 10870 - protein, 14 aa, Artificial Sequence
  Synthetic
ARVITPRGHDAFDM

SEQ ID NO: 10871 - protein, 111 aa, Artificial Sequence
  Synthetic
QSVLTQPPSVSGAPGQRVTISCTGTNSNIGAGYDVHWYQQLPGTAPKLLIYANNNRPSGVPDRFSGSKSGTSASLVITGLQADDEADYYCQSYDSSLIGWVFGGGTKLTVL

SEQ ID NO: 10872 - protein, 11 aa, Artificial Sequence
  Synthetic
QSYDSSLIGWV

SEQ ID NO: 10873 - protein, 126 aa, Artificial Sequence
  Synthetic
QVQLQQWGAGLLKPSETLSLTCAVYGGSFNPYYWNWIRQPPGKGLEWIGEINDGGRTSYNPSLQSRVTISVDTSKNQFSLKLTSVTAADTAVYYCARGGVLWFGESFPYYHSLDIWGRGTTVTVSS

SEQ ID NO: 10874 - protein, 20 aa, Artificial Sequence
  Synthetic
ARGGVLWFGESFPYYHSLDI

SEQ ID NO: 10875 - protein, 106 aa, Artificial Sequence
  Synthetic
EIVLTQSPATLSLSPGERATLSCRASQSVSSYLAWYQQKPGQAPRLLIYDASNRATGIPARFSGSGSGTDFTLTISSLEPEDFAIYYCQQRGNWPSFGGGTKVEIK

SEQ ID NO: 10876 - protein, 8 aa, Artificial Sequence
  Synthetic
QQRGNWPS

SEQ ID NO: 10877 - protein, 117 aa, Artificial Sequence
  Synthetic
EVQLVESGGGLIQPGGSLRLSCAASGLTVSSNYMTWVRQAPGKGLEWVSVIFSGGSTFYADSVRGRFTISRDNSKNTLYLQMNSLRADDTAFYYCARDLGPRGMDVWGQGTTVTVSS

SEQ ID NO: 10878 - protein, 11 aa, Artificial Sequence
  Synthetic
ARDLGPRGMDV

SEQ ID NO: 10879 - protein, 107 aa, Artificial Sequence
  Synthetic
DIQLTQSPSFLSASVGDRVTITCRASQGISNYLAWYQQKPGKAPKLLIYAASTLQSGVPSRFSGSGSGTEFTLTISSLQPEDFATYYCQQLNSDLFTFGPGTKVDIK

SEQ ID NO: 10880 - protein, 9 aa, Artificial Sequence
  Synthetic
QQLNSDLFT

SEQ ID NO: 10881 - protein, 116 aa, Artificial Sequence
  Synthetic
EVQLVESGGGLVQPGGSLRLSCAASEITVSSNYMTWVRQAPGKGLEWVSVIYSGGSTFYADSVKGRFTISRDSSKNTLYLQMNSLRVDDTAVYYCVRDLYNYGMDVWGQGTTVTVS

SEQ ID NO: 10882 - protein, 11 aa, Artificial Sequence
  Synthetic
VRDLYNYGMDV

SEQ ID NO: 10883 - protein, 107 aa, Artificial Sequence
  Synthetic
DIQLTQSPSFLSASVGDRVTITCRASQGISNYLAWYQQKAGKAPKLLIYAASTLQSGVPSRFSGSGSGTEFTLTISSLQPADFATYYCQHPNTYTYTFGQGTKLEIK

SEQ ID NO: 10884 - protein, 9 aa, Artificial Sequence
  Synthetic
QHPNTYTYT

SEQ ID NO: 10885 - protein, 122 aa, Artificial Sequence
  Synthetic
EVQLVESGGGLVQPGGSLRLSCAASGFTFSEYDMHWVRQATGKGLEWVSAIGTAGDTYYPGSVKGRFTISRENAKNSLYLQMNSLRAGDTAIYYCARRDSGSFLGNWYFDLWGRGTLVTVSS

SEQ ID NO: 10886 - protein, 16 aa, Artificial Sequence
  Synthetic
ARRDSGSFLGNWYFDL

SEQ ID NO: 10887 - protein, 108 aa, Artificial Sequence
  Synthetic
DIQMTQSPSSLSASVGDRVTITCRAGQSIGSYLNWYQQKPGKAPKLLIYAASTLKSGVPSRFSGSGSGTEFTLTISSLQPEDFATYHCQQSYTMPPITFGQGTRLEIK

SEQ ID NO: 10888 - protein, 10 aa, Artificial Sequence
  Synthetic
QQSYTMPPIT

SEQ ID NO: 10889 - protein, 126 aa, Artificial Sequence
  Synthetic
QVQLVQSGAEVKKPGASVKVSCKASGYTFSTYGISWVRQAPGQGLEWMGWISPYNGYTNYAQKVQGRVTMTTDTSTSTAYMELGSLRSDDTAVYYCARCITAAVSRDYYYYGMDVWGQGTTVTVSS

SEQ ID NO: 10890 - protein, 19 aa, Artificial Sequence
  Synthetic
ARCITAAVSRDYYYYGMDV

SEQ ID NO: 10891 - protein, 106 aa, Artificial Sequence
  Synthetic
SYVLTQPPSVSVSPGQTATITCSGDKVGYKDVCWYLQKPGQSPLMVIYQDTKRPSGIPERFSGSNSGNTATLTISGTQAMDEADYYCQAWDSGTAPFGGGTKLTVL

SEQ ID NO: 10892 - protein, 9 aa, Artificial Sequence
  Synthetic
QAWDSGTAP

SEQ ID NO: 10893 - protein, 128 aa, Artificial Sequence
  Synthetic
QVQLQESGPGLVKPSQTLSLTCAVSGGSISSVNFYWSWIRQPAGKGLEWIGRFSSTVSTNYNPSLKSRVSISVDTSKNQFSLKLSSVTAADTAVYYCAREVYYYDRRGYYKSEGFDHWGQGTLVTVSS

SEQ ID NO: 10894 - protein, 20 aa, Artificial Sequence
  Synthetic
AREVYYYDRRGYYKSEGFDH

SEQ ID NO: 10895 - protein, 106 aa, Artificial Sequence
  Synthetic
DIQMTQSPSSLSASVGDRVTITCQASQDITNYLNWYQQKPGRAPKLLIFDASNLETGVPSRFSGSGSGTDFSFTISSLQPEDFATYYCQHSDNLFMYTFGQGTKLE

SEQ ID NO: 10896 - protein, 10 aa, Artificial Sequence
  Synthetic
QHSDNLFMYT

SEQ ID NO: 10897 - protein, 127 aa, Artificial Sequence
  Synthetic
QVQLVQSGAEVKKPGASVKVSCKASGYTFSTNGISWVRQAPGQGLEWMGWISAYNGHTKYDQKLQGRVTMTTDTSTSTAYMELRSLRSDDTAVYYCARDLDSRDYYESSDYFNFDYWGQGTLVTVSS

SEQ ID NO: 10898 - protein, 20 aa, Artificial Sequence
  Synthetic
ARDLDSRDYYESSDYFNFDY

SEQ ID NO: 10899 - protein, 111 aa, Artificial Sequence
  Synthetic
QSVLTQPPSVSGAPGQRVTISCTGSSSNIGAGYVVHWYQQLPGTAPKLLIYGNSNRPSGVPDQFSGSKSGTSASLAITGLQSEDEADYYCKAWDNSLNARVFGGGTKLTVL

SEQ ID NO: 10900 - protein, 11 aa, Artificial Sequence
  Synthetic
KAWDNSLNARV

SEQ ID NO: 10901 - protein, 122 aa, Artificial Sequence
  Synthetic
QVQLVQSGAEVKKPGASVKVSCKASGYTFTSYYMHWVRQAPGQGLEWLGIINPDGGSIRYAPKFQGRVTMTSDTSTSTVYMDLSSLRSEDTAVYYCARDLFVVPAANAFEIWGQGTMVTVSS

SEQ ID NO: 10902 - protein, 15 aa, Artificial Sequence
  Synthetic
ARDLFVVPAANAFEI

SEQ ID NO: 10903 - protein, 107 aa, Artificial Sequence
  Synthetic
DIQLTQSPSFLSASVGDRVTITCRASQGISSYLAWYQQKPGKAPKLLIYAASTLQSGVPSRFSGSGSGTEFTLTISSLQPEDFATYYCQQLNSYPRTFGQGTKVEIK

SEQ ID NO: 10904 - protein, 9 aa, Artificial Sequence
  Synthetic
QQLNSYPRT

SEQ ID NO: 10905 - protein, 131 aa, Artificial Sequence
  Synthetic
QVQLVQSGAEVKKPGSSVKVSCKASGGTFSSYAFTWVRQAPGQGLEWMGGIIPIFGTPDYAQYFQGRVTITADKSTTTAYMELTSLRSDDTAVYYCARARGDHDSVWGTFVKHYYYGLDVWGQGTTVTVSS

SEQ ID NO: 10906 - protein, 24 aa, Artificial Sequence
  Synthetic
ARARGDHDSVWGTFVKHYYYGLDV

SEQ ID NO: 10907 - protein, 107 aa, Artificial Sequence
  Synthetic
DIQMTQSPSSLSASVGDRVTITCRASQNISDFLNWYQQKLGKAPKLLIYAASSLQSGVPSRFSGSGSGTDFILTISSLQPEDFATYYCQQSYSSPRTFGQGTKVELK

SEQ ID NO: 10908 - protein, 9 aa, Artificial Sequence
  Synthetic
QQSYSSPRT

SEQ ID NO: 10909 - protein, 120 aa, Artificial Sequence
  Synthetic
QVQLVESGGGVVQPGRSLRLSCAASGFTFSTYAMHWVRQTPGKGLEWVAVISDDGSAKFYADSVKGRFTISRDNSKNTLFLQMNSLRADDTAVYYCARDHNINVYVFDYWGQGTLVTVSS

SEQ ID NO: 10910 - protein, 13 aa, Artificial Sequence
  Synthetic
ARDHNINVYVFDY

SEQ ID NO: 10911 - protein, 108 aa, Artificial Sequence
  Synthetic
DIQMTQSPSSLSASVGDRVTITCRASQSINNYLNWYQQKPGKAPKLLIYAASSLQSGVPSRFSGSGSGTDYTLTISSLHPEDFATYYCQQSYSTLALTFGGGTKVEIK

SEQ ID NO: 10912 - protein, 10 aa, Artificial Sequence
  Synthetic
QQSYSTLALT

SEQ ID NO: 10913 - protein, 117 aa, Artificial Sequence
  Synthetic
EVQLVESGGGLIQPGGSLRLSCAASEVIVSRNYMNWVRQAPGKGLEWVSVMYSGGSTFYADSVKGRFTISRDDSKNTLYLQMNNLRVEDTAVYFCARDLGNSEFDLWGQGTLVTVSS

SEQ ID NO: 10914 - protein, 11 aa, Artificial Sequence
  Synthetic
ARDLGNSEFDL

SEQ ID NO: 10915 - protein, 108 aa, Artificial Sequence
  Synthetic
DIQLTQSPSFLSASVGDRVTITCRASQGISSYLAWYQQKPGKAPKLLIYAASTLQSGVPPRFSGSGSGTEFTLTISSLQPEDFATYYCQQLNSYPPITFGQGTRLEIK

SEQ ID NO: 10916 - protein, 10 aa, Artificial Sequence
  Synthetic
QQLNSYPPIT

SEQ ID NO: 10917 - protein, 123 aa, Artificial Sequence
  Synthetic
QVQLVESGGGVVQPGRSLRLSCAASGFTFRRYGMHWVRQAPGKGLEWVAYISYDGDDKFYADSVKGRFTVSRDDSKNTLLLQLNNLTTDDTAFYYCAKLGDSYAYDMSYFDYWGQGTLVTVSS

SEQ ID NO: 10918 - protein, 16 aa, Artificial Sequence
  Synthetic
AKLGDSYAYDMSYFDY

SEQ ID NO: 10919 - protein, 107 aa, Artificial Sequence
  Synthetic
DIQMTQSPSTLSASVGDRVTITCRASQSISDWLAWYQQKPGKAPKFLIYKASSLETGVPSRFSGSGSGTEFTLTISSLQPDDFATYYCQQYSSYPRTFGQGTKVEIK

SEQ ID NO: 10920 - protein, 9 aa, Artificial Sequence
  Synthetic
QQYSSYPRT

SEQ ID NO: 10921 - protein, 126 aa, Artificial Sequence
  Synthetic
QVQLVESGGGVVQPGRSLRLSCAASGFTFSNYAMHWVRQAPGKGLEWVSFLSYDGTDKYYTDSVKGRFIISRDNSRNTLYLQMNGLRAEDTAVYYCARDSPPPDQYSSDTSGYYDWGQGTLVIVSS

SEQ ID NO: 10922 - protein, 19 aa, Artificial Sequence
  Synthetic
ARDSPPPDQYSSDTSGYYD

SEQ ID NO: 10923 - protein, 107 aa, Artificial Sequence
  Synthetic
DIQLTQSPSFLSASVGDRVTITCRASQGIRTYLAWYQQKPGKAPKLLIYAASTLQSGVPSRFSGSGSGTEFTLTISSLQPEDFATYFCQQVNSYPPTFGGGTKVEIK

SEQ ID NO: 10924 - protein, 9 aa, Artificial Sequence
  Synthetic
QQVNSYPPT

SEQ ID NO: 10925 - protein, 127 aa, Artificial Sequence
  Synthetic
QVQLVESGGGVVQPGGSLRLSCAASGFTFSSSAFNWVRQAPGEGLEWVAVISSDGSAKFYADSVKGRFTISRDNSKNTVYMQMNNLRAEDTAVYYCARENIVVVVTAPWGHYGMDVWGQGTTVTVSS

SEQ ID NO: 10926 - protein, 20 aa, Artificial Sequence
  Synthetic
ARENIVVVVTAPWGHYGMDV

SEQ ID NO: 10927 - protein, 108 aa, Artificial Sequence
  Synthetic
DIQMTQSPSSLSASVGDRVTITCRASQSISRYLNWYQQKPGKAPKLLIYAASSLQSGVSSRFSGSGSGTDFTLTISSLEPEDFATYFCQQSYSTLALSFGGGTKVEIK

SEQ ID NO: 10928 - protein, 10 aa, Artificial Sequence
  Synthetic
QQSYSTLALS

SEQ ID NO: 10929 - protein, 119 aa, Artificial Sequence
  Synthetic
QVQLVESGGGVVRPGRSLRLSCAASGFTFSRYTIYWVRQAPGKGLEWVTLISYDGTNKYFADSVKGRFTISRDSSKNTVYLQMNSLRAEDTAVYYCAREGGYSNGLDVWGQGTTVIVSS

SEQ ID NO: 10930 - protein, 12 aa, Artificial Sequence
  Synthetic
AREGGYSNGLDV

SEQ ID NO: 10931 - protein, 110 aa, Artificial Sequence
  Synthetic
QSVLTQPASVSGSPGQSITISCTGTSSDVGAYYFVSWYQQHPGKAPKLMIYDVNDRPSGVSNRFSGSKSGNTASLTISGLQAEDEADYYCNSYTSNSTYVFGTGTKVTVL

SEQ ID NO: 10932 - protein, 10 aa, Artificial Sequence
  Synthetic
NSYTSNSTYV

SEQ ID NO: 10933 - protein, 122 aa, Artificial Sequence
  Synthetic
QVQLVQSGAEVKKPGASVKVSCKASGYTFTSQYLHWVRQAPGQGLEWMGIINPSAGSTTYAQKFQGRVTMTTDTSTSTVYMELSGLRSEDTAVYYCARDYSFLPSHYGMDVWGQGTTVTVSS

SEQ ID NO: 10934 - protein, 15 aa, Artificial Sequence
  Synthetic
ARDYSFLPSHYGMDV

SEQ ID NO: 10935 - protein, 107 aa, Artificial Sequence
  Synthetic
EIVLTQSPATLSLSPGERATLSCRASQSVSSYLAWYQQKPGQAPRLLMYDASNRATGIPARFSGSGSGTDFTLTISSLEPEDFAVYYCLQRSNWPWTFGQGTKVEIK

SEQ ID NO: 10936 - protein, 9 aa, Artificial Sequence
  Synthetic
LQRSNWPWT

SEQ ID NO: 10937 - protein, 120 aa, Artificial Sequence
  Synthetic
QVQLVESGGGVVQPGRSLRLSCAASGFTFSSFAMHWVRQAPGKGLEWVAVILSDGRNKLYADSVKGRFTISRDNSKNILYLQVNSLRPEDRAVYYCARDYGAMTTYMDVWGQGTTITVSS

SEQ ID NO: 10938 - protein, 13 aa, Artificial Sequence
  Synthetic
ARDYGAMTTYMDV

SEQ ID NO: 10939 - protein, 108 aa, Artificial Sequence
  Synthetic
DIQMTQSPSSLSASVGDRVTITCRTSQNVRNFLNWYQHKPGEAPKLLIDTTSRLQRGVPSRFSGSGSGTDFTLTITNVQREDFATYYCQQSYNTPPWTFGQGTNVEIK

SEQ ID NO: 10940 - protein, 10 aa, Artificial Sequence
  Synthetic
QQSYNTPPWT

SEQ ID NO: 10941 - protein, 130 aa, Artificial Sequence
  Synthetic
EVQLLESGGGLVQPGGSLRLSCAASGFTFSTYAMSWVRQAPGKGLEWVSASSGSGGNTDYADSVRGRFTISRDNSKNTLHLQMNSLRVEDTAVYYCAKDHLYCYGGTCYGRLGDYYFDNWGQGTLVTVSS

SEQ ID NO: 10942 - protein, 23 aa, Artificial Sequence
  Synthetic
AKDHLYCYGGTCYGRLGDYYFDN

SEQ ID NO: 10943 - protein, 107 aa, Artificial Sequence
  Synthetic
DIQMTQSPSTLSASVGDRVTITCRASQGIDSWLAWYQQKPGKAPKLLIYKASSLETGVPSRFSGSGSGTEFTLTISSLQPDDFATYYCQQYNNWAYTFGQGTKLEIK

SEQ ID NO: 10944 - protein, 9 aa, Artificial Sequence
  Synthetic
QQYNNWAYT

SEQ ID NO: 10945 - protein, 125 aa, Artificial Sequence
  Synthetic
EVQLVQSGAEVKKPGESLKISCKDSGYTFTTYWIAWVRQMPGKDLEWMGIIYPDDSDTRYSPSFQGQVTISADKSINTAYLQWSSLKASDTAMYYCATWSGNLSPRYYYYAMDVWGQGTTVTVSS

SEQ ID NO: 10946 - protein, 18 aa, Artificial Sequence
  Synthetic
ATWSGNLSPRYYYYAMDV

SEQ ID NO: 10947 - protein, 109 aa, Artificial Sequence
  Synthetic
QSVLTQPASVSGSPGQSITISCSGISSDVVAYNYVSWYQQHPGKAPKLIIYDVDNRPSGVSNRFSGSQSGNTASLTISGLQAEDEADYYCSSYTSRNTWVFGGGTKLTV

SEQ ID NO: 10948 - protein, 10 aa, Artificial Sequence
  Synthetic
SSYTSRNTWV

SEQ ID NO: 10949 - protein, 125 aa, Artificial Sequence
  Synthetic
QVQLVQSGAEVKKPGSSVKVSCKASGGTFTRNPISWVRQAPGQGLEWMGGIIPISNTANYAQKFQGRVTITADKPTITSYMELNSLRSEDTAVYYCARYKFDITDLGVVEGIGLDVWGQGTTVTV

SEQ ID NO: 10950 - protein, 20 aa, Artificial Sequence
  Synthetic
ARYKFDITDLGVVEGIGLDV

SEQ ID NO: 10951 - protein, 107 aa, Artificial Sequence
  Synthetic
EIVMTQSPATLSVSPGERATLSCRASQSVTSNLAWYQQKPGQSPRLLIHGASTRATGVPARFSGSGSETNFTLTISSLQSEDFAVYYCQQYNNWPQTFGQGTKVEIK

SEQ ID NO: 10952 - protein, 9 aa, Artificial Sequence
  Synthetic
QQYNNWPQT

SEQ ID NO: 10953 - protein, 126 aa, Artificial Sequence
  Synthetic
EVQLVESGGGLVQPGGSLRLSCAASGFSFSNYNMNWVRLAPGKGLEWVSYISGSSSSIYYADSVKGRFIISRDNAKNSMYLQMSSLRVEDGGVYYCARGSSDCGGDCYSADYFDSWGQGTLVTVSS

SEQ ID NO: 10954 - protein, 19 aa, Artificial Sequence
  Synthetic
ARGSSDCGGDCYSADYFDS

SEQ ID NO: 10955 - protein, 105 aa, Artificial Sequence
  Synthetic
SYVLTQPPSLSVAPGMTARITCGGDSIGSKSVHWYQQKPGQAPVVVIYYDTDRPSGIPERFSGSNSGNAATLTISRVEAGDEADYYCQVWDISVLFGGGTKLTVL

SEQ ID NO: 10956 - protein, 8 aa, Artificial Sequence
  Synthetic
QVWDISVL

SEQ ID NO: 10957 - protein, 129 aa, Artificial Sequence
  Synthetic
QVQLVQSGAEVKKPGSSVKVSCKASGGTFTSYAINWVQQAPGQGLEWMGGIIPIFGTANYAQKFQGRVTITADESTSTAYMELTSLRSEDTAVYYCARDAADVVVLPAAKWLDYGMDVWGQGTTVTVSS

SEQ ID NO: 10958 - protein, 22 aa, Artificial Sequence
  Synthetic
ARDAADVVVLPAAKWLDYGMDV

SEQ ID NO: 10959 - protein, 106 aa, Artificial Sequence
  Synthetic
SYVLTQPPSVSVSPGQTARITCSGDAFPNLYAYWYQQKPGQAPVLVIYKDSERPSGIPERFSGSSSGTTVTLTISGVQAEDEADYYCHSVDSSGRVFGGGTKLTVL

SEQ ID NO: 10960 - protein, 9 aa, Artificial Sequence
  Synthetic
HSVDSSGRV

SEQ ID NO: 10961 - protein, 124 aa, Artificial Sequence
  Synthetic
QVQLVQSGAEVKKPGSSVKVSCKASGGTFSSYTITWVRQAPGQGLEWMGRIIPILNIPNYAQKFQGRVTITADKSTSTAYMELSSLRSEDTAVYYCARERGYSDYGSAYYFDLWGQGTLVTVSS

SEQ ID NO: 10962 - protein, 17 aa, Artificial Sequence
  Synthetic
ARERGYSDYGSAYYFDL

SEQ ID NO: 10963 - protein, 110 aa, Artificial Sequence
  Synthetic
QSVLTQPPSVSGAPGQRVTISCTGSSSNIGAGFDVHWYQQLPGTAPKLLIFANTNRPSGVPDRFSGSKSGTSASLAITGLQAEDEADYYCQSYDSSVSGSLFGGGTKLTV

SEQ ID NO: 10964 - protein, 11 aa, Artificial Sequence
  Synthetic
QSYDSSVSGSL

SEQ ID NO: 10965 - protein, 126 aa, Artificial Sequence
  Synthetic
QVQLVQSGAEVKKPGASVKVSCKASGYTFTGYYMHWVRQAPGQGLEWMGWINPISGATNYAQKFQGRVTMTRDTSITTVYMEMSSLRYDDTAVYYCARVLMVPEDHYYYLYGMDVWGQGTTVTVSS

SEQ ID NO: 10966 - protein, 19 aa, Artificial Sequence
  Synthetic
ARVLMVPEDHYYYLYGMDV

SEQ ID NO: 10967 - protein, 110 aa, Artificial Sequence
  Synthetic
QSVLTQPASVSGSPGQSITISCTGTSSDVGSYNLVSWYQHHPGKAPKLMIYEVTKRPSGVSNRFSGSKSGNTASLTLSDLQAEDEADYYCCSYASSRGYVFGTGTKVTVL

SEQ ID NO: 10968 - protein, 10 aa, Artificial Sequence
  Synthetic
CSYASSRGYV

SEQ ID NO: 10969 - protein, 122 aa, Artificial Sequence
  Synthetic
QVQLVQSGAEVKKPGSSVKVSCKASGGSFNSYAISWVRQAPGQGLEWVGGIVPIFDTPMYAQKFQGRVTITADKSTGTAYMELSSLRSDDTAVYYCARDQFEGSGSFYTYYYYGMDVWGQGT

SEQ ID NO: 10970 - protein, 21 aa, Artificial Sequence
  Synthetic
ARDQFEGSGSFYTYYYYGMDV

SEQ ID NO: 10971 - protein, 107 aa, Artificial Sequence
  Synthetic
SYVLTQPPSVSLSPGQTASITCSGDKLGDKFTFWYQQKPGQSPVLVIYQDGKRPSGIPERFSGSNSGNTATLTISGTQAMDEADYYCQAWDSSTAGVFGGGTKLTVL

SEQ ID NO: 10972 - protein, 10 aa, Artificial Sequence
  Synthetic
QAWDSSTAGV

SEQ ID NO: 10973 - protein, 120 aa, Artificial Sequence
  Synthetic
QVQLVQSGAEVKKPGSSVKVSCKASGDNFSKFAFTWVRQAPGQGLEWMGGIIPIFDTSNYAQKFQGRVTITADKSTSTVYMELNSLRSDDTAVYFCARILGFYTGSLDRWGQGTLVTVSS

SEQ ID NO: 10974 - protein, 13 aa, Artificial Sequence
  Synthetic
ARILGFYTGSLDR

SEQ ID NO: 10975 - protein, 107 aa, Artificial Sequence
  Synthetic
DIQMTQSPSSLSASVGDRVTITCQASQDISKSLNWYQQKPGKAPKLLIFDASNLESGVPSRFSGSGSGTDFTFTISSLQPEDIATYYCQQYDHVQITFGQGTRLDIK

SEQ ID NO: 10976 - protein, 9 aa, Artificial Sequence
  Synthetic
QQYDHVQIT

SEQ ID NO: 10977 - protein, 125 aa, Artificial Sequence
  Synthetic
QVQLVQSGAEVKKPGSSVKVSCKASGGTFSSYAITWVRQAPGQGLEWMGGIIPIFGTSKHAQRFRGRVTITADKSTSTAYMELSSLRSEDTAVYYCARAHYGDYHPTNFNWFDSWGQGTLVTVSS

SEQ ID NO: 10978 - protein, 18 aa, Artificial Sequence
  Synthetic
ARAHYGDYHPTNFNWFDS

SEQ ID NO: 10979 - protein, 113 aa, Artificial Sequence
  Synthetic
DIVMTQSPDSLAVSLGERATINCKSSQSVLYSSNNKNYLAWYQQKPRQPPKLLIYWASTRESGVPDRFSGSGSGTDFTLTISSLQAEDVAVYYCQQYYNTPYTFGQGTKLEIK

SEQ ID NO: 10980 - protein, 9 aa, Artificial Sequence
  Synthetic
QQYYNTPYT

SEQ ID NO: 10981 - protein, 120 aa, Artificial Sequence
  Synthetic
EVQLLESGGGLVQPGGSLRLSCAASRFIFSRYAMSWVRQAPGKGLEWVSGISGTGDDTHYADSVKGRFTISRDNSKNTLYLQLNSLRADDTAVYYCAKDRAASNWAFEYWGQGTLVTVSS

SEQ ID NO: 10982 - protein, 13 aa, Artificial Sequence
  Synthetic
AKDRAASNWAFEY

SEQ ID NO: 10983 - protein, 106 aa, Artificial Sequence
  Synthetic
DIQMTQSPSSLSASVGDRVTITCQASQDISNYLNWYQQKPGKAPKLLIYDASNLETGVPSRFSGSGSGTDFTFTISNLQPEDFATYYCQQYDNLRFTFGPGTKVDI

SEQ ID NO: 10984 - protein, 9 aa, Artificial Sequence
  Synthetic
QQYDNLRFT

SEQ ID NO: 10985 - protein, 121 aa, Artificial Sequence
  Synthetic
EVQLLESGGGLVQPGGSLRLSCAASGFTFSSYVMSWVRQAPGKGLEWVSSITSSGDGTFYADSVKGRFTISRDNSKNTLYLQMNSLRAEDTAVYYCAKDKGISWYDCWDYWGQGTLVTVSS

SEQ ID NO: 10986 - protein, 14 aa, Artificial Sequence
  Synthetic
AKDKGISWYDCWDY

SEQ ID NO: 10987 - protein, 108 aa, Artificial Sequence
  Synthetic
DIQMTQSPSSLSASVGDRVTITCRASQSISNYLNWFQQKAGKAPKLLIYAASSLQSGVPSRFSGSGSGTDFTLTISSLQPEDFATYYCQQSYSTPPWTFGQGTKVEIK

SEQ ID NO: 10988 - protein, 10 aa, Artificial Sequence
  Synthetic
QQSYSTPPWT

SEQ ID NO: 10989 - protein, 124 aa, Artificial Sequence
  Synthetic
QVQLVESGGGVVQPGRSLRLSCAASGFTFSDYGMHWVRQAPGKGLEWVSFISYDRSNKYYVDSVKGRFTISRDNSKNTLYLQMNSLRAEDTAVYYCAKDQFSGYYYASGSYTEYYYGMDVWGQG

SEQ ID NO: 10990 - protein, 24 aa, Artificial Sequence
  Synthetic
AKDQFSGYYYASGSYTEYYYGMDV

SEQ ID NO: 10991 - protein, 112 aa, Artificial Sequence
  Synthetic
QSVLTQPPSASGSPGQSVTISCTGTSSDVGGYNFVSWYQQHAGKAPKLIIYEVSKRPSGVPDRFSGSRSGNTASLTVSGLQAEDEADYYCSSYAGSNNFPWVFGGGTKLTVL

SEQ ID NO: 10992 - protein, 12 aa, Artificial Sequence
  Synthetic
SSYAGSNNFPWV

SEQ ID NO: 10993 - protein, 128 aa, Artificial Sequence
  Synthetic
QVQLQQWGARLLKPSETLSLICSVYGGSLSDSSWSWIRQPPGKGLEWIGEINHSGSTSYNPSLKSRVTMSIDTSKNQFSLKLSSVTAADTAVYFCARDTMVQKLTGIRYYYYSSMDVWGQGTTITVSS

SEQ ID NO: 10994 - protein, 22 aa, Artificial Sequence
  Synthetic
ARDTMVQKLTGIRYYYYSSMDV

SEQ ID NO: 10995 - protein, 108 aa, Artificial Sequence
  Synthetic
DIQMTQSPSSLSASVGDRVTITCRASQSITTYLNWYQQKPGKAPRLLIYAASTLQSGVPSRFSGRGSGTDFTLTISSLQPEDFATYYCQQSYSTPPYTFGQGTKLEIK

SEQ ID NO: 10996 - protein, 10 aa, Artificial Sequence
  Synthetic
QQSYSTPPYT

SEQ ID NO: 10997 - protein, 125 aa, Artificial Sequence; identical to SEQ ID NO: 10817
  Synthetic

SEQ ID NO: 10998 - protein, 18 aa, Artificial Sequence
  Synthetic
ASGPLEHYFESSGYPYDY

SEQ ID NO: 10999 - protein, 108 aa, Artificial Sequence; identical to SEQ ID NO: 10819
  Synthetic

SEQ ID NO: 11000 - protein, 9 aa, Artificial Sequence
  Synthetic
QQYDSSPPT

SEQ ID NO: 11001 - protein, 121 aa, Artificial Sequence
  Synthetic
QVQLQESGPGLVKPSETLSLTCTVSGGSISSYYWNWIRQPAGKGLEWIGRIYTSGSTDYNPSLRSRLTMSVDTSKNQFSLNLTSVTAADTAVYYCARDNSNYLFDAWFDPWGQGILVTVSS

SEQ ID NO: 11002 - protein, 15 aa, Artificial Sequence
  Synthetic
ARDNSNYLFDAWFDP

SEQ ID NO: 11003 - protein, 110 aa, Artificial Sequence
  Synthetic
QSVLTQAPSASGTPGQRVSISCSGSSSNIGKNYVYWYQQLPGTAPKLLIHRNNQRPSGVPDRFSGSKSGTSASLAISGLRSEDEADYYCAAWDDSLSGPVFGGGTKLTVL

SEQ ID NO: 11004 - protein, 11 aa, Artificial Sequence
  Synthetic
AAWDDSLSGPV

SEQ ID NO: 11005 - protein, 118 aa, Artificial Sequence
  Synthetic
EVQLVESGGGLIQPGGSLRLSCAASEIIVTSNYMSWVRQAPGKGLEWVSLIYSGGSTFYADSVKGRFTISRDNSKNTLYLQMNSLRAEDTAVYFCARFDPRWDGMDVWGQGTTVTVSS

SEQ ID NO: 11006 - protein, 12 aa, Artificial Sequence
  Synthetic
ARFDPRWDGMDV

SEQ ID NO: 11007 - protein, 106 aa, Artificial Sequence
  Synthetic
DIQMTQSPSSLSASVGDRVTITCRASQSISSYLNWYQQKPGKAPKLLIYAASNLQSGVPSRFSGSASGTDFTLTISSLQPEDLATYYCQQSYSTPRFGPGTKVDIK

SEQ ID NO: 11008 - protein, 8 aa, Artificial Sequence
  Synthetic
QQSYSTPR

SEQ ID NO: 11009 - protein, 121 aa, Artificial Sequence
  Synthetic
EVQLLESGGGLVQPGESLRLSCTASEFTFSSYAMSWVRQAPGKGLEWVSSISGSGDIRYSADSVKGRFTISRDNSKNTLYLQMNSLRVEDTAIYYCAKDEGLVVYDLFDYWGQGTLVTVSS

SEQ ID NO: 11010 - protein, 14 aa, Artificial Sequence
  Synthetic
AKDEGLVVYDLFDY

SEQ ID NO: 11011 - protein, 108 aa, Artificial Sequence
  Synthetic
DIQMTQSPSSLSASVGDRVTITCRASQSINSYLNWYQQKPGKAPKLLIYAASSLHSGVPSRFSGNGSGTDFTLTISSLQPEDFATYYCQQSYSTPPLTFGGGTKVEIK

SEQ ID NO: 11012 - protein, 10 aa, Artificial Sequence
  Synthetic
QQSYSTPPLT

SEQ ID NO: 11013 - protein, 117 aa, Artificial Sequence
  Synthetic
EVQLVESGGGLVPPGGSLRLSCAASEITVSRNYMSWVRQAPGKGLEWVSIIYAGGSSFNADSVKGRFTISRDDSKNILYLQMNSLRPEDTAMYYCARDLGLGNHDYWGQGTLVTVSS

SEQ ID NO: 11014 - protein, 11 aa, Artificial Sequence
  Synthetic
ARDLGLGNHDY

SEQ ID NO: 11015 - protein, 107 aa, Artificial Sequence
  Synthetic
DIQLTQSPSFLSASVGDRVTITCRASQGISNYLAWYQQKPGKAPKLLIYSASTLQSGVPSRFSGSGSGTEFTLTITSLQPEDFATYYCQQLNTYPMYSFAQGTKLEI

SEQ ID NO: 11016 - protein, 10 aa, Artificial Sequence
  Synthetic
QQLNTYPMYS

SEQ ID NO: 11017 - protein, 126 aa, Artificial Sequence
  Synthetic
QVQLVQSGAEVKKPGASVKVSCKASGYTFTEYFIHWVRQAPGQGLEWMGWINPNSGVTNYAQHFQGRVTMTGDTSISTAYMELSSLRSDDTAVYYCAREDCRSSSCIMYPGSWFDRWGQGTLVTVS

SEQ ID NO: 11018 - protein, 20 aa, Artificial Sequence
  Synthetic
AREDCRSSSCIMYPGSWFDR

SEQ ID NO: 11019 - protein, 109 aa, Artificial Sequence
  Synthetic
QSALTQPASVSGSPGQSITISCTGTSSDIGSYNYVSWYQQFPGKAPRLMIYEVNNRPSGVSNRFSGSKSGNTASLTISGLQSEDEADYYCSTFTFSVWVFGGGTKVTVL

SEQ ID NO: 11020 - protein, 9 aa, Artificial Sequence
  Synthetic
STFTFSVWV

SEQ ID NO: 11021 - protein, 131 aa, Artificial Sequence
  Synthetic
QVQLVQSGAEVKKPGSSVKVSCKASGGTFSNYAISWVRQAPGQGLEWMGEIIPLFGPANYAQKFQDRLTITADKSTTTAYMELSSLRSEDTAVYYCARAKGDHDDVWGTYKNYYYYGMDVWGQGTTVTVSS

SEQ ID NO: 11022 - protein, 24 aa, Artificial Sequence
  Synthetic
ARAKGDHDDVWGTYKNYYYYGMDV

SEQ ID NO: 11023 - protein, 107 aa, Artificial Sequence
  Synthetic
DIQMTQSPSSLSASVGDRVTITCRASQTISNYLNWYQQKPGKAPNLLIYAASSLQSGVPSRFSGSGSGSDFTLTIINLQPEDFATYYCQQTYSTPRTFGQGTKVEIK

SEQ ID NO: 11024 - protein, 9 aa, Artificial Sequence
  Synthetic
QQTYSTPRT

SEQ ID NO: 11025 - protein, 128 aa, Artificial Sequence
  Synthetic
EVQLVESGGGLVQPGGSLRLSCAASGFTFSNYDMHWFRQATGKGLEWVSVIGTDGDTYYPGSVKGRFTISRENAKNSLYLQMNSLRAGDTAVYYCARGNVYKLDTSGRDYYYYFMDVWGQGTTVTVSS

SEQ ID NO: 11026 - protein, 22 aa, Artificial Sequence
  Synthetic
ARGNVYKLDTSGRDYYYYFMDV

SEQ ID NO: 11027 - protein, 109 aa, Artificial Sequence
  Synthetic
DIQMTQSPSSLSASVGDRVTITCRASQTISSYLNWYQQKPGKAPRLLIYAASSLHTGVPSRFSGSGSGTDFTLTISSLQPEDFATYYCQQSYSHPPENTFGQGTKLHIK

SEQ ID NO: 11028 - protein, 11 aa, Artificial Sequence
  Synthetic
QQSYSHPPENT

SEQ ID NO: 11029 - protein, 128 aa, Artificial Sequence
  Synthetic
QVQLVESGGGVVQPGRSLRLSCAASGFTFRRYGMHWVRQAPGKGLEWVAVISYDGSDKYYGDSMRGRFTISRDNSKNTLYLQMNSLRAEDTAVYYCAKEMDMTTVTDDYYYYYGVDVWGQGTTVTVSS

SEQ ID NO: 11030 - protein, 21 aa, Artificial Sequence
  Synthetic
AKEMDMTTVTDDYYYYYGVDV

SEQ ID NO: 11031 - protein, 107 aa, Artificial Sequence
  Synthetic
SYVLTQPPSVSVSPGQTASITCSGDKLGDKYASWYQQKPGQSPVLVIYQDAKRPSGIPERFSGSNSGNTATLTISGTQAIDEADYYCQTWDRSMNYVFGTGTEVTVL

SEQ ID NO: 11032 - protein, 10 aa, Artificial Sequence
  Synthetic
QTWDRSMNYV

SEQ ID NO: 11033 - protein, 121 aa, Artificial Sequence
  Synthetic
QVQLVESGGGVVQPGRSLRLSCEGSGFPFSTYAMHWVRQAPGKGLEWVAVISDDGSIKYYADSVKGRFTISRDNPKNTLFLQMNSPRAEDTAVYYCAREGAGGWNIHFDYWGQGTLVTVSS

SEQ ID NO: 11034 - protein, 14 aa, Artificial Sequence
  Synthetic
AREGAGGWNIHFDY

SEQ ID NO: 11035 - protein, 108 aa, Artificial Sequence
  Synthetic
DIQMTQSPSSLSASVGDRVTITCRASQSIGRYLNWYHHKPGKAPKLLIYAASTLQSGVPSRFSGSGSGTDFTLTINSLQPDDFATYYCQQSYSTSLYTFGQGTKLEIK

SEQ ID NO: 11036 - protein, 10 aa, Artificial Sequence
  Synthetic
QQSYSTSLYT

SEQ ID NO: 11037 - protein, 122 aa, Artificial Sequence
  Synthetic
QVQLVQSGAEVKKPGASVKVSCKASGYTFISYGISWVRQAPGQGLEWMGWISAYNGNTKYAQRLQGRVTMTTDTSTNTAYMELRSLRSDDTAVYYCARGIDFWSGFGNFDYWGQGTLVTVSS

SEQ ID NO: 11038 - protein, 15 aa, Artificial Sequence
  Synthetic
ARGIDFWSGFGNFDY

SEQ ID NO: 11039 - protein, 111 aa, Artificial Sequence
  Synthetic
QSVLTQPVSVSGSPGQSITIYCTGTSSDVGGYDYVSWYQFQPDKAPKVMIYEVTNRPSGVSNRFSGSKSGNTASLSISGLQAEDEADYYCSSYTSTNTFWVFGGGTKLTVL

SEQ ID NO: 11040 - protein, 11 aa, Artificial Sequence
  Synthetic
SSYTSTNTFWV

SEQ ID NO: 11041 - protein, 127 aa, Artificial Sequence
  Synthetic
QVQLVESGGGVVQPGRSLRLSCAASGFTFRTYGMHWVRQAPGKGLEWVAVISYDGSNQYYGDSVKGRFTISRDNSKSTLYLQMNSLRPEDTAVYYCTKAEGPYCGGSSCWGGLQKYWGQGTLVTVSS

SEQ ID NO: 11042 - protein, 20 aa, Artificial Sequence
  Synthetic
TKAEGPYCGGSSCWGGLQKY

SEQ ID NO: 11043 - protein, 107 aa, Artificial Sequence
  Synthetic
DIQMTQSPSSLSASVGDRVTITCQASQDISDSLNWYQQKPGKAPKLLIYDASNLETGFPSRFSGSESGTDFIFTINSLQPEDVATYYCQQYNNLPVTFGGGTKVDIK

SEQ ID NO: 11044 - protein, 9 aa, Artificial Sequence
  Synthetic
QQYNNLPVT

SEQ ID NO: 11045 - protein, 127 aa, Artificial Sequence
  Synthetic
QVQLQESGPGLVKPSQTLSLTCTVSGGSISSADYYWSWIRQPPGKGLEWIGYIYYIGTTYYNPSLKSRVTISQDTSKNQFSLRLRSVTAADTAVYYCARGQTTYCTGDCFSDWFDPWGQGTLVTVSS

SEQ ID NO: 11046 - protein, 19 aa, Artificial Sequence
  Synthetic
ARGQTTYCTGDCFSDWFDP

SEQ ID NO: 11047 - protein, 109 aa, Artificial Sequence
  Synthetic
EIVLTQSPATLSLSPGERATLSCRASQSVYSSLAWYQQKPGQAPRLLIHDASNRATGIPARFSGSGSGTDFTLTISSLETEDFAVYYCQQRSNWPPMYTFGQGTKVEIK

SEQ ID NO: 11048 - protein, 11 aa, Artificial Sequence
  Synthetic
QQRSNWPPMYT

SEQ ID NO: 11049 - protein, 124 aa, Artificial Sequence
  Synthetic
EVQLVESGGGLVQPGGSLRLSCAASGFTFSTYWMSWVRQAPGKGLEWVANIKQDGSEKNYVDSVKGRFTVSRDNAKNSLNLQMNSLRAEDTAVYYCARDWYNWNYVDYYGMDVWGQGTTVTVSS

SEQ ID NO: 11050 - protein, 17 aa, Artificial Sequence
  Synthetic
ARDWYNWNYVDYYGMDV

SEQ ID NO: 11051 - protein, 106 aa, Artificial Sequence
  Synthetic
SYELTQPPSVSVSPGQTARITCSGHAFPNQYAYWYQQKPGQAPMLVIYKDSERPSGIPERFSGSTSGTTVTLTISRVQAEDEADYYCQSADSSGTVFGGGTKVTVL

SEQ ID NO: 11052 - protein, 9 aa, Artificial Sequence
  Synthetic
QSADSSGTV

SEQ ID NO: 11053 - protein, 120 aa, Artificial Sequence
  Synthetic
QVQLVQSGAEMKKPGASVKVSCKASGYTFTTYPIHWVRQAPGQRLEWMGWINVGNDNTKYSQKFQDRVTITRDTSASTAYMELSSLRSEDTAVYYCARDHAARPHGMDVWGQGTTVTVSS

SEQ ID NO: 11054 - protein, 13 aa, Artificial Sequence
  Synthetic
ARDHAARPHGMDV

SEQ ID NO: 11055 - protein, 107 aa, Artificial Sequence
  Synthetic
DIQMTQSPSSLSASVGDRVTITCQASQDISKFLNWYQQKPGKAPKLLIYDASNLETGVPSRFSGSGSGTDFTFAISSLQPEDFATYYCQQYDILPVTFGQGTKLDIK

SEQ ID NO: 11056 - protein, 9 aa, Artificial Sequence
  Synthetic
QQYDILPVT

SEQ ID NO: 11057 - protein, 133 aa, Artificial Sequence
  Synthetic
QVQLVQSGAEVKKPGASVKVSCTASGYTFTGYSLYWVRQAPGQGLEWMGWINPNSGDTKYAQKFQGWVTMTRDTSISTAYMELRRLRSDDTAVYYCARGLRCSSTSCYMISLYNDYYYGMDVWGQGTTVTVSS

SEQ ID NO: 11058 - protein, 26 aa, Artificial Sequence
  Synthetic
ARGLRCSSTSCYMISLYNDYYYGMDV

SEQ ID NO: 11059 - protein, 110 aa, Artificial Sequence
  Synthetic
QSVLTQPPSASGSPGQSVTISCTGTSSDVGGYNYVSWYQQHPGKAPKLIISEVNKRPSGVPDRFSGSKSGNTASLTVSDLQAEDEADYHCTSYAGSNNLVFGGGTKLTVL

SEQ ID NO: 11060 - protein, 10 aa, Artificial Sequence
  Synthetic
TSYAGSNNLV

SEQ ID NO: 11061 - protein, 122 aa, Artificial Sequence
  Synthetic
  misc_feature (9)..(9): Xaa can be any naturally occurring amino acid
QVQLVQSGXEVKKPGASVKISCKASGYSFNDYYIHWVRQAPGQGLEWMGIMNPSGGSITYARKFQGRVTMTGDTSTSTVNMELNSLISEDTAVYYCARDAAGVPAAIGLDVWGQGTTVTVSS

SEQ ID NO: 11062 - protein, 15 aa, Artificial Sequence
  Synthetic
ARDAAGVPAAIGLDV

SEQ ID NO: 11063 - protein, 108 aa, Artificial Sequence
  Synthetic
DIQLTQSPSFLSASVGDRVTITCRASQGISSYLAWYQQKAGKAPKLLIYAASTLQSGVPSRFSGSGSGTEFTLTISSLQPEDFATYYCQKVNSYPPGTFGQGTKLEIK

SEQ ID NO: 11064 - protein, 10 aa, Artificial Sequence
  Synthetic
QKVNSYPPGT

SEQ ID NO: 11065 - protein, 119 aa, Artificial Sequence
  Synthetic
QVQLQESGPGLVKPSETLSLTCTVSGGSVNTASYYWSWIRQPPGKGLEFIGNIYYSGSTNYNPSLKSRVTISVDTSKNQFSLKLSSVTAADTAVYYCAIYQLWGAFDIWGQGTMVIVSS

SEQ ID NO: 11066 - protein, 11 aa, Artificial Sequence
  Synthetic
AIYQLWGAFDI

SEQ ID NO: 11067 - protein, 108 aa, Artificial Sequence
  Synthetic
DIQMTQSPSSLSASVGDRVTITCQASQDISNYLNWYQQKPGKAPKLLIYDASNLETGVPSRFSGSGSGTDFTFTISSLQPEDIATYYCQQYDNLFRLTFGQGTRLEIK

SEQ ID NO: 11068 - protein, 10 aa, Artificial Sequence
  Synthetic
QQYDNLFRLT

SEQ ID NO: 11069 - protein, 128 aa, Artificial Sequence
  Synthetic
QVQLVQSGAEVKKPGASVKVSCKASGYSFSDHHMHWLRQAPGQGLEWMGWINPNSGDRMYAQNFQGRVTLTRDTSINTAYMELSGLRPDDTAVYYCAKEWSGGDGLLQVWLTSWFDPWGQGTLVIVSS

SEQ ID NO: 11070 - protein, 21 aa, Artificial Sequence
  Synthetic
AKEWSGGDGLLQVWLTSWFDP

SEQ ID NO: 11071 - protein, 108 aa, Artificial Sequence
  Synthetic
DIQMTQSPSSLSATVGDRVTITCRTSQSINKYLNWYQQKPGKAPKLLIYAASHLQSGVPSRFSGSGSGTDFTLTISSLQPEDFATYYCQQSYNTPPWTFGQGTKVEIK

SEQ ID NO: 11072 - protein, 10 aa, Artificial Sequence
  Synthetic
QQSYNTPPWT

SEQ ID NO: 11073 - protein, 122 aa, Artificial Sequence
  Synthetic
QVQLVQSGAEVKKPGASVKVSCKASGYTCNSCHIHWVRQAPGQGLEWMGMMNPSGGGTSYAQKFQDRVTMTSDTSTRTFYMEVNRLRSEDTTVYYCARGRRGSSWYQAFDYWGQGTLVSVSS

SEQ ID NO: 11074 - protein, 15 aa, Artificial Sequence
  Synthetic
ARGRRGSSWYQAFDY

SEQ ID NO: 11075 - protein, 112 aa, Artificial Sequence
  Synthetic
QSVLTQPPSVSGAPGQRVTISCTGSSSNIGAGYDVHWYQQLPGTAPKLLIYDNNNRPSGVPDRFSGSKSGTSASLAITGLQAEDEADYYCQSFHNGLSGSNYVFGTGTKVTV

SEQ ID NO: 11076 - protein, 13 aa, Artificial Sequence
  Synthetic
QSFHNGLSGSNYV

SEQ ID NO: 11077 - protein, 117 aa, Artificial Sequence; identical to SEQ ID NO: 339
  Synthetic

SEQ ID NO: 11078 - protein, 11 aa, Artificial Sequence
  Synthetic
ARDLGTGLFDY

SEQ ID NO: 11079 - protein, 112 aa, Artificial Sequence
  Synthetic
QSVLTQPPSVSGAPGQRVTISCTGSSSNIGAGYDVHWYQQLPGTAPKLLIYGNTNRPSGVPDRFSGSKSGTSASLAITGLQAEDEADYYCQSYDSSLSGAWVFGGGTKLTVL

SEQ ID NO: 11080 - protein, 12 aa, Artificial Sequence
  Synthetic
QSYDSSLSGAWV

SEQ ID NO: 11081 - protein, 124 aa, Artificial Sequence
  Synthetic
QVQLQESGPGLVKPSQTLSLTCTVSGGSISSDDYYWTWIRQPPGKGLEWIGYIYYSGSTYYNPSLNSRVTISVDTSKNHFSLKVSSVTAADTAVYYCARGQLNAYGDPLGIDCWGQGTLVTVSS

SEQ ID NO: 11082 - protein, 16 aa, Artificial Sequence
  Synthetic
ARGQLNAYGDPLGIDC

SEQ ID NO: 11083 - protein, 107 aa, Artificial Sequence
  Synthetic
EIVLTQSPATLSLSPGERATLSCRASQSDNSYLVWYQQKPGQAPRLLIYDASNRATGIPPRFSGSGSGTDFTLTISSLEPEDFAVYYCQQRSNWLFAFGPGTKVDIK

SEQ ID NO: 11084 - protein, 9 aa, Artificial Sequence
  Synthetic
QQRSNWLFA

SEQ ID NO: 11085 - protein, 118 aa, Artificial Sequence
  Synthetic
EVQLVESGGGLVQPGGSLRLSCAASGFTFSSCDMHWVRQTTGKGLEWVSTIGTSGDTYYPDSVRGRFSISRENAKNSLYLQMNSLTAGDTALYYCARDCIGGWYFDLWGRGTLVTVSS

SEQ ID NO: 11086 - protein, 12 aa, Artificial Sequence
  Synthetic
ARDCIGGWYFDL

SEQ ID NO: 11087 - protein, 108 aa, Artificial Sequence
  Synthetic
DIQMTQSPSSLSAFIGDRVTITCRASQSIGNFLNWYQQKPGTAPKLLIYAASNLQSGVPSRFSGSRSGTDFTLTITNLQPEDFATYYCQQTYSTPPITFGQGTRLETK

SEQ ID NO: 11088 - protein, 10 aa, Artificial Sequence
  Synthetic
QQTYSTPPIT

SEQ ID NO: 11089 - protein, 125 aa, Artificial Sequence
  Synthetic
QVQLVQSGAEVKKPGSSVKVSCKASGGAFSSYAISWVRQAPGQGLEWMGGIIPIFGTANYAQKFQGRVTITADKSTTTAYMELSSLRSEDTAVYYCASGPHCGADCYSSYGMDVWGQGTTVTVSS

SEQ ID NO: 11090 - protein, 18 aa, Artificial Sequence
  Synthetic
ASGPHCGADCYSSYGMDV

SEQ ID NO: 11091 - protein, 107 aa, Artificial Sequence
  Synthetic
DIQMTQSPSSLSASVGDRVTITCRASQGISNSLAWYQQRPGKAPKLLLYSAFRLESGVPSRFSGSGSGTDYTLTISSLQPEDFATYYCQQYYSTPFTFGPGTKVDIK

SEQ ID NO: 11092 - protein, 9 aa, Artificial Sequence
  Synthetic
QQYYSTPFT

SEQ ID NO: 11093 - protein, 121 aa, Artificial Sequence
  Synthetic
EVQLVESGGGLVQPGRSLRLSCAASGFTFDDYAMHWVRQAPGKGLEWVSGISWNSVNIRYADSVKGRFTISRDNAKNSLFLQMNSLRAEDTALYYCAKDKGPYYHYGMDVWGQGTTVTVSS

SEQ ID NO: 11094 - protein, 14 aa, Artificial Sequence
  Synthetic
AKDKGPYYHYGMDV

SEQ ID NO: 11095 - protein, 112 aa, Artificial Sequence
  Synthetic
DIVMTQTPLSLSVTPGQPASISCKSSQSLLHSDGKTYLHWYLQKPGQSPQLVIYEASSRFSGVPDRFSGSGSGTDFTLKISRVEAEDVGVYYCMQSIPLPHTFGQGTKLEIK

SEQ ID NO: 11096 - protein, 9 aa, Artificial Sequence
  Synthetic
MQSIPLPHT

SEQ ID NO: 11097 - protein, 129 aa, Artificial Sequence
  Synthetic
QVQLVESGGGVVQPGRSLRLSCAASGFPFITYPMHWVRQAPGKGLEWVALISHDGSKEYYADSVKGRLSISRDNSKNTLNLQMNSLRVEDTAVYYCARDKFRKGDEWFGELWGTSFDYWGQGTLVTVSS

SEQ ID NO: 11098 - protein, 22 aa, Artificial Sequence
  Synthetic
ARDKFRKGDEWFGELWGTSFDY

SEQ ID NO: 11099 - protein, 111 aa, Artificial Sequence
  Synthetic
DIVMTQSPLSLPVTPGEPASISCRSSQSLLHTNGYNYLDWYLQKPGQSPQLLIYLGSNRASGVPDRFSGSGSGTDFTLKISRVEAEDVGVYYCMQGLQAPTFGPGTKVDIK

SEQ ID NO: 11100 - protein, 8 aa, Artificial Sequence
  Synthetic
MQGLQAPT

SEQ ID NO: 11101 - protein, 120 aa, Artificial Sequence
  Synthetic
QLQLQESGPGLVKPSETLSLACTVSGDSISSSRYFWAWIRQPPGKSLEWVGSLYYSETTYYNPSLKSRVTISVDTSKNQFSLRLSAVTAADTAVYYCTRQTWLRGVFDYWGQGSLVTVSS

SEQ ID NO: 11102 - protein, 12 aa, Artificial Sequence
  Synthetic
TRQTWLRGVFDY

SEQ ID NO: 11103 - protein, 110 aa, Artificial Sequence
  Synthetic
NFMLTQPHSVSESPGKTVTISCTRSSGYIASNYVQWYQQRPGSSPTTVIYEDNQRPSGVPGRFSGSIDSSSNSASLTISGLQTEDEADYYCQSYDSSNWVFGGGTKVTVL

SEQ ID NO: 11104 - protein, 9 aa, Artificial Sequence
  Synthetic
QSYDSSNWV

SEQ ID NO: 11105 - protein, 119 aa, Artificial Sequence
  Synthetic
QVQLVQSGAEVKKPGSSVKVSCKASGGTFSSNSITWVRQAPGQGLEWMGRIIPILGIANYAQNFEGRLTITADKSTSTANMELTSLRSDDTAVYYCARVSLAGTYFDLWGRGTLVTVSS

SEQ ID NO: 11106 - protein, 12 aa, Artificial Sequence
  Synthetic
ARVSLAGTYFDL

SEQ ID NO: 11107 - protein, 111 aa, Artificial Sequence
  Synthetic
  misc_feature (4)..(4): Xaa can be any naturally occurring amino acid
QSVXTQPPSVSGAPGQRVTISCTGTNSNIGAGYDVHWYQQLPGTAPRLLIYDNNNRPSGVPDRFSGSKSGTSPSLAITGLQAEDEADYYCQSYDSGLNGDVFGTGTKVTVL

SEQ ID NO: 11108 - protein, 11 aa, Artificial Sequence
  Synthetic
QSYDSGLNGDV

SEQ ID NO: 11109 - protein, 117 aa, Artificial Sequence
  Synthetic
EVQLVETGGGLIQPGGSLRLSCAASGFIVSTNYMSWVRQAPGKGLEWVSVIYSATNKQYADSVKGRFTISIDNSKNTLYLQMNSLRAGDTAVYYCAREGVMRDGYSWGQGTLVTVSS

SEQ ID NO: 11110 - protein, 11 aa, Artificial Sequence
  Synthetic
AREGVMRDGYS

SEQ ID NO: 11111 - protein, 106 aa, Artificial Sequence
  Synthetic
DIQMTQSPSSLSASVGDRVTITCQASEDINNYLNWYQQKPGKAPKLLIYDASNLETGVPSRFSGSGSGTDFTFTISSLQPEDIATYYCQQYDTLYSFGQGTKLEIK

SEQ ID NO: 11112 - protein, 8 aa, Artificial Sequence
  Synthetic
QQYDTLYS

SEQ ID NO: 11113 - protein, 122 aa, Artificial Sequence
  Synthetic
QVQLQESGPGLVKPSGTLSLTCTVSGGSISTYYWSWIRQSPGKGLEWIGYIFHSGGTNYNPSLRSRVIMSVDTSKNQFSLKLRSVTAADTAMYYCARDRGYDSGGPDAFDIWGQGTMVTVSS

SEQ ID NO: 11114 - protein, 16 aa, Artificial Sequence
  Synthetic
ARDRGYDSGGPDAFDI

SEQ ID NO: 11115 - protein, 107 aa, Artificial Sequence
  Synthetic
EIVLTQSPATLSLSPGERATLSCRASQSVSSYLAWYQQKPGQAPRLLIYDASNRATGIPARFSGSGSGTDFTLTISSLEPEDFAVYYCHQRSNWPGTFGQGTKLDIK

SEQ ID NO: 11116 - protein, 9 aa, Artificial Sequence
  Synthetic
HQRSNWPGT

SEQ ID NO: 11117 - protein, 127 aa, Artificial Sequence
  Synthetic
QVQLVQSGAEVKKPGASVKVSCKASGYLFTGYYLHWVRQAPGQGLEWMGRINPINPYSGGTEYAQKFEGRVTVTRDTSITTVYMELSSLRSDDTAVYYCARGPPPYKWNDGNYFDYWGQGTLVTVSS

SEQ ID NO: 11118 - protein, 17 aa, Artificial Sequence
  Synthetic
ARGPPPYKWNDGNYFDY

SEQ ID NO: 11119 - protein, 112 aa, Artificial Sequence
  Synthetic
DIVMTQSPLSLPVTPGEPASISCRSSQSLLYSNGYNYLDWYLQKPGQSPQLLIYLTSNRAAGVPDRFSGSGSGTDFTLKISRVEAEDVGIYYCMQALQTPYTFGQGTKLEIK

SEQ ID NO: 11120 - protein, 9 aa, Artificial Sequence
  Synthetic
MQALQTPYT

SEQ ID NO: 11121 - protein, 121 aa, Artificial Sequence
  Synthetic
QVQLQESGPGLVKPSETLSLTCTVSGGSIDSYFWNWIRQPAGKGLEWIGRIYTSGSTNYNPSLKSRVTMSVDTSKNQFSLTLTSVTAADTAVYYCARDNSNYLFDSWFDPWGQGTLVTVSS

SEQ ID NO: 11122 - protein, 15 aa, Artificial Sequence
  Synthetic
ARDNSNYLFDSWFDP

SEQ ID NO: 11123 - protein, 110 aa, Artificial Sequence
  Synthetic
  misc_feature (3)..(3): Xaa can be any naturally occurring amino acid
QSXLTQPPSASGTPGQRVTISCSGSSSNIGKNYIFWYQHFPGTAPKLLIYRNNHRPSGVPDRFSGSKSGTSASLAITGLRSEDEADYYCSAWDDTLSGPVFGGGTKLTVL

SEQ ID NO: 11124 - protein, 11 aa, Artificial Sequence
  Synthetic
SAWDDTLSGPV

SEQ ID NO: 11125 - protein, 125 aa, Artificial Sequence
  Synthetic
QVQLQESGPGLVKPSETLSLTCTVSDGSISGYYWSWIRQSPGKGLEWIGNIYYSGSTNYNPSLKSRVTISVDTSRNQFSLKLGSVTAADTALYYCARDTYYYDSSRYFVNWFDPWGQGTLVTVSS

SEQ ID NO: 11126 - protein, 19 aa, Artificial Sequence
  Synthetic
ARDTYYYDSSRYFVNWFDP

SEQ ID NO: 11127 - protein, 111 aa, Artificial Sequence
  Synthetic
QSVLTQPPSVSGAPGQRVTISCTGSSSNIGAGFDVHWYQQLPGTAPKLLIYNSINRPSGVPDRFSGSKSGTSASLAITGLQPEDEADYYCQSYGTSLSVYVFGTGTKVTVL

SEQ ID NO: 11128 - protein, 11 aa, Artificial Sequence
  Synthetic
QSYGTSLSVYV

SEQ ID NO: 11129 - protein, 130 aa, Artificial Sequence
  Synthetic
QVQLVQSGAEVKKPGSSVKVSCKASGGTFSNYAFNWVRQAPGQGLEWMGGIIPLFGTPKYAQKFQGRVTITADKSTTTAYMDLSSLRSDDTAVYYCARETLQYDDVWGSYSPYYYGLDVWGQGTTVTVSS

SEQ ID NO: 11130 - protein, 23 aa, Artificial Sequence
  Synthetic
ARETLQYDDVWGSYSPYYYGLDV

SEQ ID NO: 11131 - protein, 106 aa, Artificial Sequence
  Synthetic
DIQLTQSPSFLSASVGDRVTITCRASQGISNYLAWYQQKPGKAPQLLIYAASTLQSGVPSRFSGSGSGTEFTLTISSLQPEDFATYYCQQLNSYLTFGGGTKVDIK

SEQ ID NO: 11132 - protein, 8 aa, Artificial Sequence
  Synthetic
QQLNSYLT

SEQ ID NO: 11133 - protein, 117 aa, Artificial Sequence
  Synthetic
EVQLVESGGGLVQPGGSLRLSCAASEIIVSRNYMNWVRQAPGKGLEWVSVIYSGGSTFYADSVKGRFTISRDNSRNTLYLHMNSLRAEDTAVYYCARGYGDYYFDYWGQGTLVTVSS

SEQ ID NO: 11134 - protein, 11 aa, Artificial Sequence
  Synthetic
ARGYGDYYFDY

SEQ ID NO: 11135 - protein, 104 aa, Artificial Sequence
  Synthetic
EIVLTQSPGTLSLSPGERAILSCRASQSVDSSYLAWYQQKPGRAPRLLISGASSRATGIPDRFSGSGSGTDFTLTISSLEPEDFAVYYCHQLQTFGQGTKVEIK

SEQ ID NO: 11136 - protein, 5 aa, Artificial Sequence
  Synthetic
HQLQT

SEQ ID NO: 11137 - protein, 122 aa, Artificial Sequence
  Synthetic
QVQLVQSGAEVKKPGASVKLSCKASGYTFNNCYIHWVRQAPGQGLEWMGIINPDGGAITYAQKFQGRVIMTSDTSTSTVYMELSSLKSGDTAVYYCARGSIVPAARGAFDIWGQGTMVIVSS

SEQ ID NO: 11138 - protein, 15 aa, Artificial Sequence
  Synthetic
ARGSIVPAARGAFDI

SEQ ID NO: 11139 - protein, 107 aa, Artificial Sequence
  Synthetic
DIQMTQSPSTLSASVGDRVTITCRASQSISNWLAWYQQKPGKAPKLLIYRASSLESGVPSRFSGSGSGTEFTLTISSLQPDDFATYYCQQYNSYSWTFGQGTKVEIK

SEQ ID NO: 11140 - protein, 9 aa, Artificial Sequence
  Synthetic
QQYNSYSWT

SEQ ID NO: 11141 - protein, 122 aa, Artificial Sequence
  Synthetic
QVQLVQSGAEVKKPGASVKVSCKASGYTFTRYYMHWVRQAPGQGLEWMGIMNPSGSGTTYAQKFQGRVTMTSDTSTSTVYMEMSSLRSEDTAVYYCTRDLFGVPASNAFDIWGQGTMVTVSS

SEQ ID NO: 11142 - protein, 15 aa, Artificial Sequence
  Synthetic
TRDLFGVPASNAFDI

SEQ ID NO: 11143 - protein, 107 aa, Artificial Sequence
  Synthetic
DIQLTQSPSFLSASVGDRVTITCRASQGISSSLAWYQQKPGKAPKLLIYAASTLQTGVPSRFSGSGSATEFTLTISSLQPEDFATYYCQQLNSYPRTFGQGTKVEIK

SEQ ID NO: 11144 - protein, 9 aa, Artificial Sequence
  Synthetic
QQLNSYPRT

SEQ ID NO: 11145 - protein, 124 aa, Artificial Sequence
  Synthetic
QVQLVESGGGVVQPGRSLRLSCAASGFTFSDYGMHWVRQAPGKGLEWVAAIWYDGINKYYADSVKGRFTISRDNSKNTLYLQVNSLRAEDTAVYFCARDNTIMGYYSYYYAMDVWGQGTTVTVS

SEQ ID NO: 11146 - protein, 18 aa, Artificial Sequence
  Synthetic
ARDNTIMGYYSYYYAMDV

SEQ ID NO: 11147 - protein, 113 aa, Artificial Sequence
  Synthetic
DIVMTQSPDSLAVSLGERATISCKSSQSFLYSSNNKNYLAWYQQKPGQPPKLLIYWASTRESGVPDRFSGSGSGTDFTLTISSLQAEDVAVYYCQQFYGTSWTFGQGTKVEIK

SEQ ID NO: 11148 - protein, 9 aa, Artificial Sequence
  Synthetic
QQFYGTSWT

SEQ ID NO: 11149 - protein, 128 aa, Artificial Sequence
  Synthetic
EVQLVESGGGLVKPGGSLRVSCAASGFTFLNAWMSWVRQAPGKGLEWVGRIYSKTDGETTDYAAPVKGRFTISRDDSKNTLYLEMNSLKTEDTAVYYCTTLRRTTSGSYYDDYYFDHWGQGTLVTVSS

SEQ ID NO: 11150 - protein, 19 aa, Artificial Sequence
  Synthetic
TTLRRTTSGSYYDDYYFDH

SEQ ID NO: 11151 - protein, 106 aa, Artificial Sequence
  Synthetic
SYELTQPPSVSVSPGQTARITCSGHSLPTQYVYWYQQKPGQAPVLVIYKDTERPSGIPERFSGSSSGTTATLTISGVQAEDEADYYCQSADSSGTSFGGGSMLTVL

SEQ ID NO: 11152 - protein, 9 aa, Artificial Sequence
  Synthetic
QSADSSGTS

SEQ ID NO: 11153 - protein, 123 aa, Artificial Sequence
  Synthetic
QVQLVESGGGVVQPGRSLRLSCAVSGLTFSHYGMHWVRQAPGKGLEWVAVISYDGNDKHYEESVKGRFTVSRDNSKNTMYLQMNSLRAEDSGVYFCAKRGDSYAYPNTYLDYWGQGTLVTVSS

SEQ ID NO: 11154 - protein, 16 aa, Artificial Sequence
  Synthetic
AKRGDSYAYPNTYLDY

SEQ ID NO: 11155 - protein, 107 aa, Artificial Sequence
  Synthetic
DIQMTQSPSTLSASVGDRVTITCRASQSIIRWLAWYQQKPGKAPKLLIYEASSLESGVPSRFSGSGSGTEFTLTISSLQPDDFATYYCQQYNSYSGTFGQGTKVEIK

SEQ ID NO: 11156 - protein, 9 aa, Artificial Sequence
  Synthetic
QQYNSYSGT

SEQ ID NO: 11157 - protein, 129 aa, Artificial Sequence
  Synthetic
EVQLVQSGAEVKKPGESLKISCKGSGYSFTTYYIAWVRQMPGKGLEWMGIIYPDDSDTRYSPSFRGQVSFSADKSIATAYLQWSSLKASDTAIYFCARHQAPVGIFPGPDYYYYALDVWGQGTTVTVSS

SEQ ID NO: 11158 - protein, 22 aa, Artificial Sequence
  Synthetic
ARHQAPVGIFPGPDYYYYALDV

SEQ ID NO: 11159 - protein, 107 aa, Artificial Sequence
  Synthetic
EIVLTQSPGTLSLSPGERATLSCRASQSVSSSYLAWYQQKPGQAPRLLIYGASSRATGIPDRFSGSGSGTDFTLTISRLEPEDFAVYYCQQYGSSPTFGQGTKVEIK

SEQ ID NO: 11160 - protein, 8 aa, Artificial Sequence
  Synthetic
QQYGSSPT

SEQ ID NO: 11161 - protein, 117 aa, Artificial Sequence
  Synthetic
EVQLVESGGGLIQPGGSLRLSCAASGVIVSSNYMTWVRQAPGKGLEWVSIIYSGGSTFYADSVKGRFTISRDNSKNTLYLQMDSLRAEDTAVYFCARDLVNWGMDVWGQGTTVTVSS

SEQ ID NO: 11162 - protein, 11 aa, Artificial Sequence
  Synthetic
ARDLVNWGMDV

SEQ ID NO: 11163 - protein, 107 aa, Artificial Sequence
  Synthetic
DIQLTQSPSFLSASVGDRVTITCRASQGISNYLAWYQQKPGKAPNLLIYSASTLQSGVPSRFSGSGSGTEFTLTISSLQAEDLATYFCQHHDTYLVTFGQGTKLEIK

SEQ ID NO: 11164 - protein, 9 aa, Artificial Sequence
  Synthetic
QHHDTYLVT

SEQ ID NO: 11165 - protein, 126 aa, Artificial Sequence
  Synthetic
EVQLVESGGGLVQPGGSLRLSCAASGFTFSSYDMHWVRQSTGKGLEWVSAIGTAGDTYYPDSVKGRFTISRENVKNSFYLQMNNLRPGDTAVYYCAREGCIGAVGTCMSGWYFDLWGRGTLVTVSS

SEQ ID NO: 11166 - protein, 20 aa, Artificial Sequence
  Synthetic
AREGCIGAVGTCMSGWYFDL

SEQ ID NO: 11167 - protein, 108 aa, Artificial Sequence
  Synthetic
DIQMTQSPSSLSASVGDRVTITCRASQTISSFLNWYQQKPGKAPNLLIYAASRLQRGVPSRFSGSGSGTDFTLTISSLQPEDFATYYCQQSYSTPPITFGQGTRLEIK

SEQ ID NO: 11168 - protein, 10 aa, Artificial Sequence
  Synthetic
QQSYSTPPIT

SEQ ID NO: 11169 - protein, 122 aa, Artificial Sequence
  Synthetic
QVQLVESGGGVVQPGRSLRLSCAASGFTFSNYGMHWVRQAPGKGLEWVALISYDGDDKYYSDSVRGRFTISKDNSKNTLNLQMNSLRTDDTAVYYCAKGPWYSSDLPYFEYWGQGTLVTVSS

SEQ ID NO: 11170 - protein, 15 aa, Artificial Sequence
  Synthetic
AKGPWYSSDLPYFEY

SEQ ID NO: 11171 - protein, 109 aa, Artificial Sequence
  Synthetic
SYVLTQPPSVSVAPGQTARITCGGNNIGSNSFHWYQQKPGQAPVLVVYDDSDRPSGIPERFSGSNSGNTATLTISRVEAGDEADYYCQVWDSSSDLNWVFGGGTKLAVL

SEQ ID NO: 11172 - protein, 12 aa, Artificial Sequence
  Synthetic
QVWDSSSDLNWV

SEQ ID NO: 11173 - protein, 126 aa, Artificial Sequence
  Synthetic
QVQLVQSGAEVKKPGSSVKVSCKASGDTFSRYSISWVRQAPGQGLEWMGRIIPILGIPNYAQKFQGRVTIIADKSTNTAYMELSSLRFEDTALYYCARSEVYYYDSSGYYWRFDSWGQGTLVTVSS

SEQ ID NO: 11174 - protein, 19 aa, Artificial Sequence
  Synthetic
ARSEVYYYDSSGYYWRFDS

SEQ ID NO: 11175 - protein, 106 aa, Artificial Sequence
  Synthetic
DIQMTQSPSSLSASLGDRVTITCRASQNISRYLNWYQQKPGEAPKLLMYAASTLQSGVPSRFSGSGSGTDFTLTISSLQPEDFATYYCQQSYSSPTFGPGTKVDVK

SEQ ID NO: 11176 - protein, 8 aa, Artificial Sequence
  Synthetic
QQSYSSPT

SEQ ID NO: 11177 - protein, 137 aa, Artificial Sequence
  Synthetic
QVQLVQSGAEVKKPGSSVKVSCKASGGTFSTYAISWVRQAPGQGLEWMGGIIPIFGPANNAVSGMGNTAQKFEGRVTIGADESTGTAYMELSSLRPEDTAVYYCARDRGSCGSPSCPSYYYYGMDVWGQGTTVTVSS

SEQ ID NO: 11178 - protein, 22 aa, Artificial Sequence
  Synthetic
ARDRGSCGSPSCPSYYYYGMDV

SEQ ID NO: 11179 - protein, 107 aa, Artificial Sequence
  Synthetic
  misc_feature (12)..(12): Xaa can be any naturally occurring amino acid
DIQMTQSPSSLXASVGDRVTITCQASQDISNHLNWYQQKPGKAPNLLIYDASNLEAGVPSRFSGGGSGTDFTVTISGLQPEDIATYYCQQYNNVPLTFGQGTRLDIK

SEQ ID NO: 11180 - protein, 9 aa, Artificial Sequence
  Synthetic
QQYNNVPLT

SEQ ID NO: 11181 - protein, 133 aa, Artificial Sequence
  Synthetic
QVQLVQSGAEVKKPGASVKVSCKASGYLFTGYYIHWVRQAPGQGLKWMGWINPMSGGTNYAQKFQGRVTMTSDTSITTAYMELNRLRSDDTAVYFCARVDQFLVEPGTIDPRLEAYNYGMDVWGQGTTVTVSS

SEQ ID NO: 11182 - protein, 26 aa, Artificial Sequence
  Synthetic
ARVDQFLVEPGTIDPRLEAYNYGMDV

SEQ ID NO: 11183 - protein, 110 aa, Artificial Sequence
  Synthetic
QSALTQPASVSGSPGQSITISCTGTSNDIGNYNLVSWYQQHPGKAPKLMIYEVSKRPSGVSNRFSGSRSGNTASLTISGLQTEDEADYYCCSYARTNTFIFGGGTKLTVL

SEQ ID NO: 11184 - protein, 10 aa, Artificial Sequence
  Synthetic
CSYARTNTFI

SEQ ID NO: 11185 - protein, 124 aa, Artificial Sequence
  Synthetic
QVQLVQSGAEVKKPGASVRVSCKASGYSFSNYAISWVRQAPGQGLEWMGWISGYNGNRDYAQKFQGRVTMTADTSTSTAYMELRTLRSDDTAVYYCARESRDDHGDYPPRFDPWGQGTLIIVSS

SEQ ID NO: 11186 - protein, 17 aa, Artificial Sequence
  Synthetic
ARESRDDHGDYPPRFDP

SEQ ID NO: 11187 - protein, 108 aa, Artificial Sequence
  Synthetic
EIVLTQSPGTLCLSPGERATLSCRASQSISTFYLAWYQHKPGQPPRLLIYGASSRATGIPDRFSGSGSETDFTLTISRLEPEDSALYYCQHHDSSLWTFGQGTKVEIK

SEQ ID NO: 11188 - protein, 9 aa, Artificial Sequence
  Synthetic
QHHDSSLWT

SEQ ID NO: 11189 - protein, 122 aa, Artificial Sequence
  Synthetic
QLQLQESGSGLVKPSQTLSLTCAVSGGSINSGDYSWSWIRQPPGKGLEWLGNIYHSGSTNYNPSLKSRVTISVDRSKNQFSLKLSSVTAADTAVYFCARTVLVITDNYFDYWGQGTLVTVSS

SEQ ID NO: 11190 - protein, 14 aa, Artificial Sequence
  Synthetic
ARTVLVITDNYFDY

SEQ ID NO: 11191 - protein, 105 aa, Artificial Sequence
  Synthetic
SYVLTQPPSVSVAPGQTARITCGGNKIGTKSVHWYQQKPGQAPVLVVYDDSDRPSGIPERFSGSNSGNTATLTISRVEAGDEADYYCQVWNSSRVFGGGTKLTVL

SEQ ID NO: 11192 - protein, 8 aa, Artificial Sequence
  Synthetic
QVWNSSRV

SEQ ID NO: 11193 - protein, 124 aa, Artificial Sequence
  Synthetic
QVQLVQSGAEVKKPGSSVKVSCKASGGTFSSFAISWVRQAPGQGLEWLGGIIPILRIAKDAQKFQGRVKITADESTTTAYMELSSLRSEDTAIYYCATLSYEGSGIPPGGMDAWGQGTTVSVSS

SEQ ID NO: 11194 - protein, 17 aa, Artificial Sequence
  Synthetic
ATLSYEGSGIPPGGMDA

SEQ ID NO: 11195 - protein, 110 aa, Artificial Sequence
  Synthetic
EIVMTQSPATLSVSPGERATLSCRASQSINSNLAWYQQKPGQAPRLLIYGASTRATGIPARFSGSASGTEFTLTISSLQSEDFAVYYCQQYNRWPSLMYTFGPGTKLEIK

SEQ ID NO: 11196 - protein, 12 aa, Artificial Sequence
  Synthetic
QQYNRWPSLMYT

SEQ ID NO: 11197 - protein, 131 aa, Artificial Sequence
  Synthetic
QVQLVQSGAEVKKPGSSVTVSCKASGGTFSNYAFSWVRQAPGQGLEWMGGIIPLFGTPNYAQNFQGRVTITADKSTTTVYMDLSSLRSDDTAVYYCARARGDHDDVWGGYLNYYYYGMDVWGQGTTVTVSS

SEQ ID NO: 11198 - protein, 24 aa, Artificial Sequence
  Synthetic
ARARGDHDDVWGGYLNYYYYGMDV

SEQ ID NO: 11199 - protein, 106 aa, Artificial Sequence
  Synthetic
DIQMTQSPSSLSASVGDRVTITCRASQNISSSLNWYHHKTGKAPKLLIYAASSLQSGVPSRFSGSGSGTDFTLTITSLQPEDFAAYYCQQSYSSPRTFGQGTKVDI

SEQ ID NO: 11200 - protein, 9 aa, Artificial Sequence
  Synthetic
QQSYSSPRT

SEQ ID NO: 11201 - protein, 125 aa, Artificial Sequence; identical to SEQ ID NO: 10817
  Synthetic

SEQ ID NO: 11202 - protein, 18 aa, Artificial Sequence
  Synthetic
ASGPLEHYFESSGYPYDY

SEQ ID NO: 11203 - protein, 108 aa, Artificial Sequence; identical to SEQ ID NO: 10819
  Synthetic

SEQ ID NO: 11204 - protein, 9 aa, Artificial Sequence
  Synthetic
QQYDSSPPT

SEQ ID NO: 11205 - protein, 127 aa, Artificial Sequence
  Synthetic
QVQLVQSGAEVRKPGSSVKISCKASGGTFNNYAFSWVRQGPGQGLEWMAEITPIFGTVKYAQKFQGRVTITADKSTRTSYMELSSLRFEDTAVYYCARVVLDKGDDDYFYYYGIDVWGQGTSVTVSS

SEQ ID NO: 11206 - protein, 20 aa, Artificial Sequence
  Synthetic
ARVVLDKGDDDYFYYYGIDV

SEQ ID NO: 11207 - protein, 108 aa, Artificial Sequence
  Synthetic
SYVLTQPPSVSVSPGQTARITCSGDGLPKQYAYWYQQKSGQAPVVVIYKDIERPSGIPERFSGSSSGTTVTLTISGVQAEDEADYYCQSADSSGTYRVFGGGTKLTVL

SEQ ID NO: 11208 - protein, 11 aa, Artificial Sequence
  Synthetic
QSADSSGTYRV

SEQ ID NO: 11209 - protein, 130 aa, Artificial Sequence
  Synthetic
QVQLVQSGAEVKKPGSSVKVSCKASGGSFSNYGFHWVRQAPGQGLEWMGGIIPLFGPANYAQKFQGRVTITADRGTRTAYMELTNVRSEDTAVYYCARETLNYDSLWGTYSPYYHGMDVWGQGTTVTVSS

SEQ ID NO: 11210 - protein, 23 aa, Artificial Sequence
  Synthetic
ARETLNYDSLWGTYSPYYHGMDV

SEQ ID NO: 11211 - protein, 106 aa, Artificial Sequence
  Synthetic
DIQLTQSPSFLSASVGDRVTITCRASQGSNSSLVWYQQKPGKAPKLLIYTASTLQSGVPSRFSGSGSGTDFTLTISSLQPEDVASYYCQQLNSYFTFGGGTKVEIK

SEQ ID NO: 11212 - protein, 8 aa, Artificial Sequence
  Synthetic
QQLNSYFT

SEQ ID NO: 11213 - protein, 123 aa, Artificial Sequence
  Synthetic
EVQLLESGGNLVQFGGSLRLSCAASGFTFSSYAMSWVRQAPGKGLEWVSAICDSGGCTYYADSVRGRFTISRDNSKNTLYLQINSLRAEDTAVYYCAKEAPATVTSGMVFDNWGQGTLVTVSS

SEQ ID NO: 11214 - protein, 16 aa, Artificial Sequence
  Synthetic
AKEAPATVTSGMVFDN

SEQ ID NO: 11215 - protein, 108 aa, Artificial Sequence
  Synthetic
DIQMTQSPSSLSASVGDRVTITCRASQSINNYLNWYQQKSGKAPKLLIYDASSLQSGVPSRFSGSGSGTDYTLTISSLQPEDFATYYCQQSYSSPPITFGQGTRLEIK

SEQ ID NO: 11216 - protein, 10 aa, Artificial Sequence
  Synthetic
QQSYSSPPIT

SEQ ID NO: 11217 - protein, 123 aa, Artificial Sequence
  Synthetic
QVQLVQSGAEVKKPGSSVKVSCKASGGTFSSSTISWVRQAPGQGLEWMGRIIPIFGTPNYALKFQGRVTITADRSTSIAYMELSSLRSEDTAVYYCARDGGGGPQYENWFDPWGQGTLVTVSS

SEQ ID NO: 11218 - protein, 16 aa, Artificial Sequence
  Synthetic
ARDGGGGPQYENWFDP

SEQ ID NO: 11219 - protein, 111 aa, Artificial Sequence
  Synthetic
QSALTQPASVSGSPGQSITISCTGTSSDVGNYNLVSWYQQHPGKAPKLIIYEVTKRPSGVSNRFSGSKSGNTASLTISGLRAEDEADYYCCSYAGVSTYVLFGGGTKLTVL

SEQ ID NO: 11220 - protein, 11 aa, Artificial Sequence
  Synthetic
CSYAGVSTYVL

SEQ ID NO: 11221 - protein, 127 aa, Artificial Sequence
  Synthetic
  misc_feature (36)..(37): Xaa can be any naturally occurring amino acid
  misc_feature (39)..(39): Xaa can be any naturally occurring amino acid
EVQLVESGGGVVRPGGSLRLSCAASGFTVDDYGMSXXLXGPGKGLEWVSGYNLIDGRTGYADSVKGRFTMSRDNAKNSLYLQMNSLRVEDTAFYYCARDNKVYDVVLLSAFGAFDLWGQGTTVTVSS

SEQ ID NO: 11222 - protein, 20 aa, Artificial Sequence
  Synthetic
ARDNKVYDVVLLSAFGAFDL

SEQ ID NO: 11223 - protein, 112 aa, Artificial Sequence
  Synthetic
QSALTQPASVSGSPGQSITISCTGTTSDVGSYNFVSWYQQYPGKAPKLMIYEVTKRPSGVSNRFSGSKSGNTASLTISGLQAEDEADYYCCSYAGTTTSEAYVFGTGTKVSV

SEQ ID NO: 11224 - protein, 13 aa, Artificial Sequence
  Synthetic
CSYAGTTTSEAYV

SEQ ID NO: 11225 - protein, 127 aa, Artificial Sequence
  Synthetic
QVQLVQSGAEVKKPGSSMKVSCKASGGTFSNYAINWVRQAPGQGLEWMGGIIPLLRTADYAQRFQGRITVTADESTSTTYMELSSLTSEDTAVYYCAKSDIAVRRGPYSFYYGMDVWGQGTTVSVSS

SEQ ID NO: 11226 - protein, 20 aa, Artificial Sequence
  Synthetic
AKSDIAVRRGPYSFYYGMDV

SEQ ID NO: 11227 - protein, 114 aa, Artificial Sequence
  Synthetic
  misc_feature (9)..(10): Xaa can be any naturally occurring amino acid
DIVMTQSPXXLPVTPGEPASISCRSSQSLLQSNGYNYLDWYLQKPGQSPQLLIYLGSNRASGVPDRFSGSGSDTDFTLKISRVEAEDVGVYYCMQALQTPPVITFGQGTRLEIK

SEQ ID NO: 11228 - protein, 11 aa, Artificial Sequence
  Synthetic
MQALQTPPVIT

SEQ ID NO: 11229 - protein, 127 aa, Artificial Sequence
  Synthetic
QVQLVESGGGVVQPGKSRRLSCAVSGFTFNKYGMHWVRQAPGKGLEWVAVILYDGSDKYYADSVKGRFTISRDNSKNTLYLQMNSLRVEDTAVYYCAKVTGQYCSGGDCYSGYFDYWGQGTLVTVSS

SEQ ID NO: 11230 - protein, 20 aa, Artificial Sequence
  Synthetic
AKVTGQYCSGGDCYSGYFDY

SEQ ID NO: 11231 - protein, 107 aa, Artificial Sequence
  Synthetic
DIQMTQSPSSLSSSVGDRVTITCRASQGISNSLAWYQQKPGKAPNLLLYDAARLESGVPSRFIGSGSGTDYILTISSLQPEDFATYYCQQYYSTPNTFGPGTKVDIK

SEQ ID NO: 11232 - protein, 9 aa, Artificial Sequence
  Synthetic
QQYYSTPNT

SEQ ID NO: 11233 - protein, 122 aa, Artificial Sequence
  Synthetic
QLQLQESGPGLVKPSETLSLICTVSGGAISSSYYWWGWIRQPPGKGLEWIGTIYNNGNTYYNPSLKSRVTLSVDTSKNQFSLKLKSVTAADTAVYYCARQQWLITPNWFGPWGQGTLVTVSS

SEQ ID NO: 11234 - protein, 14 aa, Artificial Sequence
  Synthetic
ARQQWLITPNWFGP

SEQ ID NO: 11235 - protein, 111 aa, Artificial Sequence
  Synthetic
NFMLTQPHSVSESPGKTVTISCTRNSDSIASNYVQWYQQRPGSSPTIVIYEDNQRPSGVPDRFSGSIDSSSNSASLIISGLKTEDEADYYCQSYDSSNPVVFGGGTKLTVL

SEQ ID NO: 11236 - protein, 10 aa, Artificial Sequence
  Synthetic
QSYDSSNPVV

SEQ ID NO: 11237 - protein, 122 aa, Artificial Sequence
  Synthetic
QVQLVQSGAEVKKPGASVKVSCKASGYTFTSNYMHWVRQAPGQGLEWMGIINPSAGSTSYAQKFQGRVTMTRDTSTSTIYMELSSLRSEDTAVYYCARDIVFVPAAMALDYWGQGTLVTVSS

SEQ ID NO: 11238 - protein, 15 aa, Artificial Sequence
  Synthetic
ARDIVFVPAAMALDY

SEQ ID NO: 11239 - protein, 108 aa, Artificial Sequence
  Synthetic
  misc_feature (9)..(10): Xaa can be any naturally occurring amino acid
EIVLTQSPXXLSLSPGERATLSCRASQSVSSYLAWYQQKPGQAPRLLIYDASNRATGIPARFSGSGSGTDFTLTISSLEPEDFAVYYCQQRSNWPPFTFGPGTKVDIK

SEQ ID NO: 11240 - protein, 10 aa, Artificial Sequence
  Synthetic
QQRSNWPPFT

SEQ ID NO: 11241 - protein, 114 aa, Artificial Sequence
  Synthetic
  misc_feature (20)..(20): Xaa can be any naturally occurring amino acid
EVQLVESGGGLVQPGGSLRXSCAASGFTVSRNYMSWVRQAPGKGLEWVSVIYSGGSTFYADSVKGRFTISRDNSKNTLYLQMNSLRAEDTAVYYCARDVRDSIWGQGTLVTVSS

SEQ ID NO: 11242 - protein, 8 aa, Artificial Sequence
  Synthetic
ARDVRDSI

SEQ ID NO: 11243 - protein, 106 aa, Artificial Sequence
  Synthetic
  misc_feature (10)..(10): Xaa can be any naturally occurring amino acid
DIQMTQSPVXLSASVGDRVTITCQASQDIRNYLNWYQHKPGKAPKLLIYDASNLETGVPSRFSGSGSGTDFTFTISSLQPEDIATYFCQQYDNLPVTFGGGTKVEI

SEQ ID NO: 11244 - protein, 9 aa, Artificial Sequence
  Synthetic
QQYDNLPVT

SEQ ID NO: 11245 - protein, 123 aa, Artificial Sequence
  Synthetic
QVQLVQSGAEVKKPGASVKVSCKASGYTFISYVINWVRQAPGQGPEWMGWISPYNGNTNYAQKLQGRVTMTTDTSTSTVYMELRSLRSDDTAVYYCARGPDETGSYGIWFDPWGQGTLVTVSS

SEQ ID NO: 11246 - protein, 16 aa, Artificial Sequence
  Synthetic
ARGPDETGSYGIWFDP

SEQ ID NO: 11247 - protein, 110 aa, Artificial Sequence
  Synthetic
QSVLTQPPSASGTPGQRVTISCSGSSSNLGSNYVYWYQQLPGTAPKVLIYRNNQRPSGVPDRFSGAKSGTSASLAITGLRSEDEADYYCAAWDDSLSGWVFGGGTKLTVL

SEQ ID NO: 11248 - protein, 11 aa, Artificial Sequence
  Synthetic
AAWDDSLSGWV

SEQ ID NO: 11249 - protein, 121 aa, Artificial Sequence
  Synthetic
QVQLQQWGAGLLKPSETLSLTCAVYGGSFSGYSWTWIRQTPGKGLEWIGEINQSGSTNYNPSLKSRVTISVDTSKNQFSLKLSSVTAADTAVYYCARWSYIFGFLGGFDPWGQGTLVTVSS

SEQ ID NO: 11250 - protein, 15 aa, Artificial Sequence
  Synthetic
ARWSYIFGFLGGFDP

SEQ ID NO: 11251 - protein, 106 aa, Artificial Sequence
  Synthetic
EIVLTQSPGTLSLSPGERATLSCRASQSVSSSYLAWYQQKPGQAPRLLIYGASRRATGIPDRFSGSGSGTDFTLTISRLEPEDFAVYYCQQYGSSLSFGGGTKVEI

SEQ ID NO: 11252 - protein, 8 aa, Artificial Sequence
  Synthetic
QQYGSSLS

SEQ ID NO: 11253 - protein, 116 aa, Artificial Sequence
  Synthetic
EVQLVESGGGLTQPGGSLRLSCAASGFTVSSNYMSWVRQAPGKGLEWVSVIYSGGSTDYADSVKGRFTISRDNSKNTLYVQMNSLRVEDTAVYYCARVVSDAFDIWGQGTMVTVSS

SEQ ID NO: 11254 - protein, 10 aa, Artificial Sequence
  Synthetic
ARVVSDAFDI

SEQ ID NO: 11255 - protein, 107 aa, Artificial Sequence
  Synthetic
DIQMTQSPSTLSASVGDRVTITCRASQSISSWLAWYQQKPGKAPKLLIYKASILESGVPSRFSGSGSGTEFTLTISSLQPDDFATYYCQHYDSYRYTFGQGTKLEIK

SEQ ID NO: 11256 - protein, 9 aa, Artificial Sequence
  Synthetic
QHYDSYRYT

SEQ ID NO: 11257 - protein, 117 aa, Artificial Sequence
  Synthetic
EVQLVESGGGSVHPGESLRLSCAASGFGFSISWMHWVRQAPGKGPVWVSVISSDGTIITYADSVRGRFTISRDNAKSALYLQMNSLRAEDTGIYYCTSDYYGSINYWGQGTLVTVSS

SEQ ID NO: 11258 - protein, 10 aa, Artificial Sequence
  Synthetic
TSDYYGSINY

SEQ ID NO: 11259 - protein, 112 aa, Artificial Sequence
  Synthetic
  misc_feature (8)..(8): Xaa can be any naturally occurring amino acid
DIVMTQTXVSLSVTPGQPASISCKSSQSLLHNDGKTYLYWYLQKPGQPPQLLIYDVSNRFSGVPDRFSGSGSGTDFTLKISRVETEDVGVYYCMQTTQLPWTFGQGTRVEIK

SEQ ID NO: 11260 - protein, 9 aa, Artificial Sequence
  Synthetic
MQTTQLPWT

SEQ ID NO: 11261 - protein, 117 aa, Artificial Sequence
  Synthetic
EVQLVESGGGLVQPGGSLRLSCAASEFIVSRNYMSWVRQAPGKGLEWVSVIYSGGSTFYADSVKGRFTISRDNSKNTLYLQMNSLRVEDTAVYYCARDYGDFYFDHWGQGTLVTVSS

SEQ ID NO: 11262 - protein, 11 aa, Artificial Sequence
  Synthetic
ARDYGDFYFDH

SEQ ID NO: 11263 - protein, 107 aa, Artificial Sequence
  Synthetic
  misc_feature (8)..(10): Xaa can be any naturally occurring amino acid
EIVMTQSXXXLSVSPGERATLSCRASQSVSSNLAWYQQKPGQAPRLLIYGASTRATGIPARFSGSGSGTEFTLTISSLQSEDFAVYYCQHYYNWPRTFGGGTKVEIK

SEQ ID NO: 11264 - protein, 9 aa, Artificial Sequence
  Synthetic
QHYYNWPRT

SEQ ID NO: 11265 - protein, 118 aa, Artificial Sequence
  Synthetic
QVQLQESGPGLVKPSETLSLTCTVSGDSISGYYWSWIRQPPGKGLEWIGYIYYSGSTNYNPSLKSRITISVDTSKNHFSLKLSSVTAADTAVYYCAREGGRFGEFDYWGQGTLVTVSS

SEQ ID NO: 11266 - protein, 12 aa, Artificial Sequence
  Synthetic
AREGGRFGEFDY

SEQ ID NO: 11267 - protein, 108 aa, Artificial Sequence
  Synthetic
EIVLTQSPGTLSLSPGERATLSCRASQSLYSSYLAWYQQKPGQAPRLLFYGASNRATGIPDRFSGSGSGTDFTLTITRLEPEDFAVYYCQQYGSSFPTFGGGTKVEIK

SEQ ID NO: 11268 - protein, 9 aa, Artificial Sequence
  Synthetic
QQYGSSFPT

SEQ ID NO: 11269 - protein, 126 aa, Artificial Sequence
  Synthetic
QVQLVQSGAEVKKPGSSVKVSCKASGGTFSSYAISWVRQAPGQGLEWMGGIIPIFGRANYAQKFQGRVTITADESTSTAYMELSSLRSEDTAVYYCARGEGYCSGGSCYRWWFDPWGQGTLVTVSS

SEQ ID NO: 11270 - protein, 19 aa, Artificial Sequence
  Synthetic
ARGEGYCSGGSCYRWWFDP

SEQ ID NO: 11271 - protein, 105 aa, Artificial Sequence
  Synthetic
SYVLTQPLSVSVALGQTARITCGGNNIGSKNVHWYQQKPGQAPVLVIYRDSNRPSGIPERFSGSNSGNTATLTISRAQAGDEADYYCQVWDSSTVFGGGTKLTVL

SEQ ID NO: 11272 - protein, 8 aa, Artificial Sequence
  Synthetic
QVWDSSTV

SEQ ID NO: 11273 - protein, 117 aa, Artificial Sequence
  Synthetic
EVQLVESGGGLVQPGGSLRLSCAASGVTVSRNYMSWVRQAPGKGLEWVSVIYSGGSTFYADSVKGRFTISRDNSKNTLYLQMNSLRAEDTAVYYCARDLVQFGIDIWGQGTMVTVSS

SEQ ID NO: 11274 - protein, 11 aa, Artificial Sequence
  Synthetic
ARDLVQFGIDI

SEQ ID NO: 11275 - protein, 109 aa, Artificial Sequence
  Synthetic
DIQLTQSPSFLSASVGDRVTITCRASQGISSNLAWYQQRPGKAPKLLIYSASTLQSGVPSRFSGSGSGTEFTLTISSLQPEDFATYYCQQLNSYSWEWTFGQGTKVEIK

SEQ ID NO: 11276 - protein, 11 aa, Artificial Sequence
  Synthetic
QQLNSYSWEWT

SEQ ID NO: 11277 - protein, 121 aa, Artificial Sequence
  Synthetic
QVQLVESGGGVVQPGRSLRLSCVASGFTFSRYGMHWVRQAPGKGLEWVAVIPYDGSNKYYADSVKGRCTISRDNSKNTLYLQMNSLRAEDTAVYYCAKAGHYYYYYYMDVWGKGTTVTVSS

SEQ ID NO: 11278 - protein, 14 aa, Artificial Sequence
  Synthetic
AKAGHYYYYYYMDV

SEQ ID NO: 11279 - protein, 107 aa, Artificial Sequence
  Synthetic
DIQMTQSPSSLSASVGDRVTITCQASQDINNYLNWYQQKPGKAPKVLIYDASNLETGVPSRFSGSGSGTDFTFTISSLQPEDFATYYCQQYDNLPLTFGGGTKVEIK

SEQ ID NO: 11280 - protein, 9 aa, Artificial Sequence
  Synthetic
QQYDNLPLT

SEQ ID NO: 11281 - protein, 125 aa, Artificial Sequence
  Synthetic
QLQLQESGPGLVKPSETLSLTCTVSGGSISSSSYYWGWIRQPPGKGLEWIGSIYYSGSTYYNPSLKSRVTISVDTSKNQFSLKLSSVTAADTAVYYCAREVRYCSSTSCYTFDYWGQGTLVTVSS

SEQ ID NO: 11282 - protein, 17 aa, Artificial Sequence
  Synthetic
AREVRYCSSTSCYTFDY

SEQ ID NO: 11283 - protein, 109 aa, Artificial Sequence
  Synthetic
QSVLTQPPSASGSPGQSVTISCTGTSSDVGGYNYVSWYQQHPGKAPKLMIYEVSKRPSGVPDRFSGSKSGNTASLTVSGLQAEDEADYYCNSYAGSTRLFGGGTKLTVL

SEQ ID NO: 11284 - protein, 9 aa, Artificial Sequence
  Synthetic
NSYAGSTRL

SEQ ID NO: 11285 - protein, 119 aa, Artificial Sequence
  Synthetic
QVQLVQSGAEVKKPGASVKVSCKASGYTFTSYGISWVRQAPGQGLEWMGWISAYSGNTNYTQNLQGRVTMTTDTSTTTAYMELRSLRSDDTAVYYCTRARGWLQPFDYWGQGTLVTVSS

SEQ ID NO: 11286 - protein, 12 aa, Artificial Sequence
  Synthetic
TRARGWLQPFDY

SEQ ID NO: 11287 - protein, 107 aa, Artificial Sequence
  Synthetic
  misc_feature (74)..(74): Xaa can be any naturally occurring amino acid
DIQMTQSPSSVSAFVGDRVTITCRASQGINYWLAWYQQKPGKAPKLLIYAASSLQSGVPSRFSGSGSGTDITLXTSTLQPEDFATYYCQQANSFPLTFGGGTKVEIK

SEQ ID NO: 11288 - protein, 9 aa, Artificial Sequence
  Synthetic
QQANSFPLT

SEQ ID NO: 11289 - protein, 120 aa, Artificial Sequence
  Synthetic
EVQLLESGGGLVQPGGSLRLSCADSGFTFSSYAMTWVRQAPGKGLEWVSSISYTGGSTYYADSVKGRFTISRDNSKNTLYLQMNSLGAEDTAVYYCTKGGNYGDWYFEYWGQGILVIVSS

SEQ ID NO: 11290 - protein, 13 aa, Artificial Sequence
  Synthetic
TKGGNYGDWYFEY

SEQ ID NO: 11291 - protein, 109 aa, Artificial Sequence
  Synthetic
QSVLTQPRSVSGSPGQSVTISCTGTSSDVGAYNYVSWYQQHPGKAPKLMIYEVSKRPSGVPDRFSGSKSGNTASLTISGLQAEDEADYYCCSYAGSYWVFGGGTKLTVL

SEQ ID NO: 11292 - protein, 9 aa, Artificial Sequence
  Synthetic
CSYAGSYWV

SEQ ID NO: 11293 - protein, 120 aa, Artificial Sequence
  Synthetic
QVQLVESGGGVVQPGRSLRLSCAASGFTFSRYAMHWVRQAPGKGLEWVAVIWFDGSNKYYPDSVKGRFTISRDNSKNTLYLQVTSLRAEDTAVYYCARGGFLAAWAFDIWGQGTMVTVSS

SEQ ID NO: 11294 - protein, 13 aa, Artificial Sequence
  Synthetic
ARGGFLAAWAFDI

SEQ ID NO: 11295 - protein, 108 aa, Artificial Sequence
  Synthetic
SYVLTQPPSVSVSPGQTAWITCSGDTLPKQYAYWYQQKPGQAPVLVIYKDSERPSQIPERFSGSTSGTTVTLTISGVQAEDEADYYCQSADSSGTFYVFGSGTKVTVL

SEQ ID NO: 11296 - protein, 11 aa, Artificial Sequence
  Synthetic
QSADSSGTFYV

SEQ ID NO: 11297 - protein, 122 aa, Artificial Sequence
  Synthetic
  misc_feature (113)..(113): Xaa can be any naturally occurring amino acid
EVQLLESGGDLVQPGGSLRLSCAASGFTFSSYAMTWVRQAPGKGLEWVSGISGSGGSTSYADSVKGRFTISRDNSRNTLYLQMNSLRAEDTAVYYCAKDIGERVLVNCYDFWXQGTLVTVSS

SEQ ID NO: 11298 - protein, 15 aa, Artificial Sequence
  Synthetic
AKDIGERVLVNCYDF

SEQ ID NO: 11299 - protein, 108 aa, Artificial Sequence
  Synthetic
DIQMTQSPSSLSASVGDRVTITCRASQSIRSYLNWYQQKPGKGPKLLIYAASSLQSGVPSRFSGSGSGTDFTLTISSLQPEDFATYYCQQSYSTPPDTFGQGTKLEIK

SEQ ID NO: 11300 - protein, 10 aa, Artificial Sequence
  Synthetic
QQSYSTPPDT

SEQ ID NO: 11301 - protein, 119 aa, Artificial Sequence
  Synthetic
QVQLVQSGAEVKKPGASVKVSCKASGYNLNTYGFSWVRQAPGQGLEWMGWISAYNGNTNYAQKLQGRVTMTTDTSTSTAYMELRSLRSDDTAVYYCARIEDRQVHFDYWGQGTLVTVSS

SEQ ID NO: 11302 - protein, 12 aa, Artificial Sequence
  Synthetic
ARIEDRQVHFDY

SEQ ID NO: 11303 - protein, 111 aa, Artificial Sequence
  Synthetic
QSVLTQARSVSGSPGQSVTISCTGTSSDVGGYNSVSWYQQHPGKAPKLMIYDVSKRPSGVPDRFSGSKSGNTASLTISGLQAEDEADYYCCSYAGTYTYVVFGGGTKLTVL

SEQ ID NO: 11304 - protein, 11 aa, Artificial Sequence
  Synthetic
CSYAGTYTYVV

SEQ ID NO: 11305 - protein, 125 aa, Artificial Sequence
  Synthetic
QVQLQESGPGLVKPSETLSLTCTVSGGSISSSYWSWIRQPPGKGLEWIGYISYSGSTNYNPSLKSRVTLSVDTSKNQFSLKLSSVTAADTAVYYCARDGPIYDFWSGYMGAFDIWGQGTMVTVSS

SEQ ID NO: 11306 - protein, 19 aa, Artificial Sequence
  Synthetic
ARDGPIYDFWSGYMGAFDI

SEQ ID NO: 11307 - protein, 109 aa, Artificial Sequence
  Synthetic
EIVLTQSPGTLSLSPGERATLSCRASQSVSSSYLAWDQQKPGQAPRLLIYGASSRATGIPDRFSGSGSGTDFTLTISRLEPEDFAVYYCQQYGSSPLYTFGQGTKLEIK

SEQ ID NO: 11308 - protein, 10 aa, Artificial Sequence
  Synthetic
QQYGSSPLYT

SEQ ID NO: 11309 - protein, 121 aa, Artificial Sequence
  Synthetic
EVQLVQSGAEVKKPGESLRISCKGSGYSFTNYWISWVRQMPGKGLEWMGRIDLSDSYINYSPSLQGHVTISADTSISTAYLQWSGLKASDTAMYYCAREAVVIGATQLDYWGQGTLVTVSS

SEQ ID NO: 11310 - protein, 14 aa, Artificial Sequence
  Synthetic
AREAVVIGATQLDY

SEQ ID NO: 11311 - protein, 109 aa, Artificial Sequence
  Synthetic
EIVLTQSPATLSLSPGERATLSCRASQSVSTYLAWYQHKPGQAPRLLIYDASNRATGIPARFSGSGSGTDFTLTISSLEPEDFAVYYCQQRSIWPPGYTFGQGTKLEIK

SEQ ID NO: 11312 - protein, 11 aa, Artificial Sequence
  Synthetic
QQRSIWPPGYT

SEQ ID NO: 11313 - protein, 128 aa, Artificial Sequence
  Synthetic
QLQLQESGPGLVKPSETLSLTCTVSGGSISSSNYYWGWIRQPPGKGLEWIGSIYYSGSTYNNPSLKSRVTISVDTSKNQLSLKLSSVTAADTAVYYCARHEYYYDRRGYSRLGWFDPWGQGILVTVSS

SEQ ID NO: 11314 - protein, 20 aa, Artificial Sequence
  Synthetic
ARHEYYYDRRGYSRLGWFDP

SEQ ID NO: 11315 - protein, 107 aa, Artificial Sequence
  Synthetic
DIQMTQSPSSLSASVGDRVTITCQASQDISNYLNWYQQKPGKAPKLLIYDASNLETGVPSRFSGSGSGTDFTVTISSLQPEDIATYYCQQYDNLPLTFGGGTKVEIK

SEQ ID NO: 11316 - protein, 9 aa, Artificial Sequence
  Synthetic
QQYDNLPLT

SEQ ID NO: 11317 - protein, 123 aa, Artificial Sequence
  Synthetic
QVQLQESGPGLVKPSETLSLTCIVSGGSVSSDSYYWSWIRQPPGKGLEWIGHIYFSGSTKYNPSLKSRVTISVDTSKNQFSLKLSSVTAADTAVYYCARLGRRFGELLGFDYWGQGTLVTVSS

SEQ ID NO: 11318 - protein, 15 aa, Artificial Sequence
  Synthetic
ARLGRRFGELLGFDY

SEQ ID NO: 11319 - protein, 109 aa, Artificial Sequence
  Synthetic
QSVLTQPRSVSGSPGQSVTISCTGTSSDVGSYNYVSWYQQHPGKAPKLMIYDVSKRPSGVPDRFSGSKSGNTASLTISGLQAEDEGDYYCCSYAGIYVLFGGGTKLTVL

SEQ ID NO: 11320 - protein, 9 aa, Artificial Sequence
  Synthetic
CSYAGIYVL

SEQ ID NO: 11321 - protein, 121 aa, Artificial Sequence
  Synthetic
QVQLQESGPGLVKPSETLSLTCTVSGGSISSYYWSWIRQPPGKGLEWIGYIYYSGSTNYNPSLKSRVTISVDTSKNQFSLKLSSVTAADTAVYYCARVQNIAAGPGEIDYWGQGTLVTVSS

SEQ ID NO: 11322 - protein, 15 aa, Artificial Sequence
  Synthetic
ARVQNIAAGPGEIDY

SEQ ID NO: 11323 - protein, 107 aa, Artificial Sequence
  Synthetic
  misc_feature (9)..(9): Xaa can be any naturally occurring amino acid
  misc_feature (11)..(12): Xaa can be any naturally occurring amino acid
DIQMTQSPXSXXASVGDRVTITCQASQDISNYLNWYDPDSSHPVCICRRQSHHHLPGVPSRISGSGSGTNFTFTISSLQPEDVATYFCQQYDNLPITFGQGTRLEIK

SEQ ID NO: 11324 - protein, 9 aa, Artificial Sequence
  Synthetic
QQYDNLPIT

SEQ ID NO: 11325 - protein, 115 aa, Artificial Sequence
  Synthetic
EVQLVESGGGLVQPGGSLRLSCAASGLIVSRNYMSWVRQAPGKGLEWVSVIYSGGSTFYADSVKGRFTISRDNSKNTLYLQMNSLRVEDTAVYYCAREARAFDIWGQGTMVTVSS

SEQ ID NO: 11326 - protein, 9 aa, Artificial Sequence
  Synthetic
AREARAFDI

SEQ ID NO: 11327 - protein, 105 aa, Artificial Sequence
  Synthetic
DIQLTQSPSFLSASVGDRVTITCRASQGISSYLAWYHQKPGKAPKLLIYAASTLQSGVPSRFSGSGSGTEFTLTISSLQPEDFATYYCQHLNDYPTFGGGTKVEI

SEQ ID NO: 11328 - protein, 8 aa, Artificial Sequence
  Synthetic
QHLNDYPT

SEQ ID NO: 11329 - protein, 121 aa, Artificial Sequence
  Synthetic
EVQLVESGGGLIQPGGSLRLSCAASGLTVSSNYMNWVRQAPGKGLEWVSVIYSGGSTFYADSVKGRFTISRDNSKNTLYLQMNSLRAEDTAMYYCAREGCVGGHCLLFDYWGQGTLVTVSS

SEQ ID NO: 11330 - protein, 15 aa, Artificial Sequence
  Synthetic
AREGCVGGHCLLFDY

SEQ ID NO: 11331 - protein, 108 aa, Artificial Sequence
  Synthetic
DIQMTQSPVSLSASVGDRVTITCRASQSISSNLNWYQQKPGKAPKLLIYAASSLQSGVPSRFSGSGSGTDFTLTISSLQPEDFATYYCQQSYSTPPYTFGQGTKLEIK

SEQ ID NO: 11332 - protein, 10 aa, Artificial Sequence
  Synthetic
QQSYSTPPYT

SEQ ID NO: 11333 - protein, 122 aa, Artificial Sequence
  Synthetic
EVQLVESGGGLVQPGGSLRLSCAASGFTFSNYDMHWVRQATGKGLEWVSAIGTAGDTYYPGSVKGRFTISRENAKTSLYLQMNSLRAGDTAVYYCARGRSDDYGANWYFDLWGRGTLVTVSS

SEQ ID NO: 11334 - protein, 16 aa, Artificial Sequence
  Synthetic
ARGRSDDYGANWYFDL

SEQ ID NO: 11335 - protein, 108 aa, Artificial Sequence
  Synthetic
  misc_feature (10)..(10): Xaa can be any naturally occurring amino acid
DIQMTQSPVXLSACVGDRVNITCRASQSISSYLNWYQQKPGKAPKLLIYGASSLQSGVPSRFSGSGSGTDFTLSISSLQPEDFATYYCQQSYSTPPCTFGQGTKLEIK

SEQ ID NO: 11336 - protein, 10 aa, Artificial Sequence
  Synthetic
QQSYSTPPCT

SEQ ID NO: 11337 - protein, 120 aa, Artificial Sequence
  Synthetic
EVQLVQSGAEVKKPGESLKISCKGSGYNFNTHWIGWVRQMPGKGLEWMGIIYPDDSDTRYSPSFQGQVTISADKSINTAYLQWSSLKASDTGMYYCTRRRRYDFWNFDPWGQGTLVTVSS

SEQ ID NO: 11338 - protein, 13 aa, Artificial Sequence
  Synthetic
TRRRRYDFWNFDP

SEQ ID NO: 11339 - protein, 106 aa, Artificial Sequence
  Synthetic
DIQMTQSPSSLSASVGDRVTITCQASQDISNYLNWYQQKPGKAPKLLIYDASNLETGVPSRFSGSGSGTDFTFTISSLQPEDIATYYCQQYDNVPHFGGGTKVEIK

SEQ ID NO: 11340 - protein, 8 aa, Artificial Sequence
  Synthetic
QQYDNVPH

SEQ ID NO: 11341 - protein, 122 aa, Artificial Sequence
  Synthetic
QVQLVQSGAEVKKPGASVKVSCKASGYTFTDYYMHWVRQAPGQGLEWMGIINASGGITSNAQKFQGRVMMTRDTSTSTVYMELSSLRSEDTAVYYCASAMVRGVAVWYMDVWGKGTTVTVSS

SEQ ID NO: 11342 - protein, 15 aa, Artificial Sequence
  Synthetic
ASAMVRGVAVWYMDV

SEQ ID NO: 11343 - protein, 106 aa, Artificial Sequence
  Synthetic
SYVLTQPPSVSVSPGQTASITCSGDKLGDKYACWYQQKPGQSPVLVIYQSSKRPSGIPERFSGSNSGNTATLTISGTQAMDEADYYCQTWDSSTVVFGGGTKLTVL

SEQ ID NO: 11344 - protein, 9 aa, Artificial Sequence
  Synthetic
QTWDSSTVV

SEQ ID NO: 11345 - protein, 122 aa, Artificial Sequence
  Synthetic
QVQLVESGGGVVQPGRSLRLSCAASGFTFSSYAMHWVRQAPGKGLEWVAVISYDGRIKYYADSVKGRFTISRDNSKNTMFLQMNSLRPEDTAVYYCARDESSGWFPKEIDYWGQGTLVTVSS

SEQ ID NO: 11346 - protein, 15 aa, Artificial Sequence
  Synthetic
ARDESSGWFPKEIDY

SEQ ID NO: 11347 - protein, 109 aa, Artificial Sequence
  Synthetic
SYELTQPPSVSVSPGQTARITCSGDALPKKYAYWYQQKSGQAPVLVIYEDSKRPSGIPERFSGSTSGTMATLTISGAQVEDEADYYCYSTDSSGNHHVVFGGGTKLTVL

SEQ ID NO: 11348 - protein, 12 aa, Artificial Sequence
  Synthetic
YSTDSSGNHHVV

SEQ ID NO: 11349 - protein, 126 aa, Artificial Sequence
  Synthetic
QLQLQESGPGLVKPSETLSLTCTVSGGSISTSSYYWAWIRQPPGKGLEWIGNIYYSGTTYYNPSLKSRVTISVDTSKNQFSLKLSSVTAADTAVYYCARLTRAFAGLTPVYAFDIWGQGTMVTVSS

SEQ ID NO: 11350 - protein, 18 aa, Artificial Sequence
  Synthetic
ARLTRAFAGLTPVYAFDI

SEQ ID NO: 11351 - protein, 109 aa, Artificial Sequence
  Synthetic
QSVLTQPASVSGSPGQSITISCTGTSSDVGSYNLVSWYQQYPGKAPKLMIYEGSKRPSGVSSRFSGSKSGNTASLTISGLQAEDEADYYCCSYAGSITLFGGGTKLTVL

SEQ ID NO: 11352 - protein, 9 aa, Artificial Sequence
  Synthetic
CSYAGSITL

SEQ ID NO: 11353 - protein, 123 aa, Artificial Sequence
  Synthetic
QVQLQQWGAGLLKPSETLSLTCAVYGGSFSGYSWSWIRQPPGKGLEWIGEINNSGSTNYNPSLKSRVTISVDTSKNQFSLKLSSVTAADTAVYYCARRGGGYNFPPKYYFDYWGQGTLVTVSS

SEQ ID NO: 11354 - protein, 17 aa, Artificial Sequence
  Synthetic
ARRGGGYNFPPKYYFDY

SEQ ID NO: 11355 - protein, 109 aa, Artificial Sequence
  Synthetic
EIVLTQSPGTLSLSPGERATLSCRASQSVSSSYLAWYQQKPGQAPRLLIYGASRRATGIPDRFSGSGSGTDFTLTISRLEPEDFAVYYCQQYTSSPLWTFGQGTKVEIK

SEQ ID NO: 11356 - protein, 10 aa, Artificial Sequence
  Synthetic
QQYTSSPLWT

SEQ ID NO: 11357 - protein, 122 aa, Artificial Sequence
  Synthetic
QVQLVQSGAEVKKPGSSVKVSCKASGGTFSTYAISWVRQAPGQGLEWMGGIIPLFPTAIYAQKFQGRVTLTADESTSTAYMELSSLRSEDTAVYYCARDGAPYSSGWTADYWGQGTLVTVSS

SEQ ID NO: 11358 - protein, 15 aa, Artificial Sequence
  Synthetic
ARDGAPYSSGWTADY

SEQ ID NO: 11359 - protein, 109 aa, Artificial Sequence
  Synthetic
QSVLTQEPSLTVSPGGTVTLTCASSTGAVTSGSYPNWFQQKPGQAPRALIYSTSNKHSWTPARFSGSLLGGKAALTLSGVQPEDEAEYYCLLYYGGARVFGGGTKLTVL

SEQ ID NO: 11360 - protein, 9 aa, Artificial Sequence
  Synthetic
LLYYGGARV

SEQ ID NO: 11361 - protein, 123 aa, Artificial Sequence
  Synthetic
QVQLVQSGAEVKKPGSSVKVSCKASGGTFSSYAISWVRQAPGQGLEWMGGIIPIIGTVNYAQKFQGRVTITADESTSTAYMELSSLRPEDRAVYYCARDAKDYGDYLGAFDIWGQGTMVTVSS

SEQ ID NO: 11362 - protein, 16 aa, Artificial Sequence
  Synthetic
ARDAKDYGDYLGAFDI

SEQ ID NO: 11363 - protein, 108 aa, Artificial Sequence
  Synthetic
EIVMTQSPATLSVSPGERATLSCRASQSVSSNLAWYQQKPGQAPRLLIYGASTRATGIPARFSGSGSGTEFTLTISSLQSEDFALYYCQQYNNWPPTYTFGQGTKLEI

SEQ ID NO: 11364 - protein, 11 aa, Artificial Sequence
  Synthetic
QQYNNWPPTYT

SEQ ID NO: 11365 - protein, 122 aa, Artificial Sequence
  Synthetic
EVQLVESGGGLIQPGGSLRLSCAASGFSVRDYYINWVRQAPGKGLEWVSIIYSGGTAYYADSVEGRFTLSRDTSKNMLYLQMNSLRVEDTAVYYCARGGDYHSLYEGQFDYWGQGTLVTVSS

SEQ ID NO: 11366 - protein, 16 aa, Artificial Sequence
  Synthetic
ARGGDYHSLYEGQFDY

SEQ ID NO: 11367 - protein, 111 aa, Artificial Sequence
  Synthetic
QSVLTQPPSVSAAPGQKVTISCSGSSSNIGKNYVSWYRQVPGTAPELLIYDNDKRPPGIPDRFSGSKSGTSAILGITGLQTGDEADYYCGTWEGRLNTLYVFGAGTKVAVL

SEQ ID NO: 11368 - protein, 12 aa, Artificial Sequence
  Synthetic
GTWEGRLNTLYV

SEQ ID NO: 11369 - protein, 121 aa, Artificial Sequence
  Synthetic
QVQLVQSGAEVKKPGASVKVSCKASGYTFTNYYMHWVRQAPGQGLEWMGMINPSGGGTTYAQKFQGRVTMTRDTSTTTVYMELSSLRSEDTAVYYCAMHRYDILTGYLDSWGQGTLVTVSS

SEQ ID NO: 11370 - protein, 14 aa, Artificial Sequence
  Synthetic
AMHRYDILTGYLDS

SEQ ID NO: 11371 - protein, 108 aa, Artificial Sequence
  Synthetic
SYVLTQPPSVSVAPGKTARITCGGNDIGSKNVHWYQQKPGQAPVLVVYDDSDRPSGIPERFSGSNSGNTATLTISRVEAGDEADYYCQVWDSSGDHWVFGGGTKLTVL

SEQ ID NO: 11372 - protein, 11 aa, Artificial Sequence
  Synthetic
QVWDSSGDHWV

SEQ ID NO: 11373 - protein, 117 aa, Artificial Sequence
  Synthetic
EVQLVESGGGLVQPGGSLRLSCAASGFTVSSNYMSWVRQAPGKGLEWVSVIYSGGSTFYADSVKGRFTISRDNSKNTLYLQMNSLRAEDTAVYYCARELWGGAFDIWGQGTMVTVSS

SEQ ID NO: 11374 - protein, 11 aa, Artificial Sequence
  Synthetic
ARELWGGAFDI

SEQ ID NO: 11375 - protein, 108 aa, Artificial Sequence
  Synthetic
DIQLTQSPSFLSASVGDRVTITCRASQGISSYLAWYQQKPGKAPKLLIYAASTLQSGVPSRFSGSGSGTEFTLTISSLQPEDFATYYCQQLNSYPHPTFGGGTKVEIK

SEQ ID NO: 11376 - protein, 10 aa, Artificial Sequence
  Synthetic
QQLNSYPHPT

SEQ ID NO: 11377 - protein, 120 aa, Artificial Sequence
  Synthetic
QVQLQESGPGLVKPSHTLSLTCTVSGASISSGGSYWSWIRQHPGKGLEWIGYIYYSGNTYYNPSLKSRVTISVDTSNNQFSLKLSSVTAADTAVYYCAREWGGRAGIDYWGQGTLVTVSS

SEQ ID NO: 11378 - protein, 12 aa, Artificial Sequence
  Synthetic
AREWGGRAGIDY

SEQ ID NO: 11379 - protein, 106 aa, Artificial Sequence
  Synthetic
DIQMTQSPSSLSASVGDRVTITCQASQDITNYLNWYQQKPGKAPILLIYDASNLEAGVPSRFSGSGSGTDFTFTISSLQPEDIATYYCQQYDDLLKTFGGGTKVEI

SEQ ID NO: 11380 - protein, 9 aa, Artificial Sequence
  Synthetic
QQYDDLLKT

SEQ ID NO: 11381 - protein, 129 aa, Artificial Sequence
  Synthetic
QVQLVESGGGVVQPGRSLRLSCAASGFTFSNYPMHWVRQAPGKGLEWVAVISYDGSNKYYADSVKGRFTISRDNSKDTLYLQMNSLRTEDTAVYYCARDSGTLPTYYDFWSASNWFDPWGQGTLVTVSS

SEQ ID NO: 11382 - protein, 22 aa, Artificial Sequence
  Synthetic
ARDSGTLPTYYDFWSASNWFDP

SEQ ID NO: 11383 - protein, 108 aa, Artificial Sequence
  Synthetic
DIQMTQSPSSLSASIGDRVTITCRASQSISSYLNWYQQKPGKAPKLLIYAASSLQSGVPSRFSGSGSGTDFTLTISSLQPEDFATYYCQQSYSTLEFTFGPGTKVDIK

SEQ ID NO: 11384 - protein, 10 aa, Artificial Sequence
  Synthetic
QQSYSTLEFT

SEQ ID NO: 11385 - protein, 121 aa, Artificial Sequence
  Synthetic
EVQLVESGGGLVQPGGSLRLSCSASGFTFSSYPMHWVRQAPGKGLQYISSISSDGGVTYYADSVKGRFTISRDNSKNTLYLQMSSLRTEDTAVYYCVKDRWGTTVTLFDYWGQGTLVTVSS

SEQ ID NO: 11386 - protein, 14 aa, Artificial Sequence
  Synthetic
VKDRWGTTVTLFDY

SEQ ID NO: 11387 - protein, 106 aa, Artificial Sequence
  Synthetic
DIQMTQSPSSLSASVGDRVTITCRASQSISSYLNWYQQKPGKAPNLLIYAASSLQSGVPSRFSGSGSGTDFTLTISSLQPEDFATYYCQQSYSTPTFGQGTRVEIK

SEQ ID NO: 11388 - protein, 8 aa, Artificial Sequence
  Synthetic
QQSYSTPT

SEQ ID NO: 11389 - protein, 122 aa, Artificial Sequence
  Synthetic
QVQLVESGGGVVQPGRSLRLSCAASGFTFSSYGMHWVRQAPGKGLEWVAVIWYDGSNKHYAESVKGRFTISRDNSKNTLYLQMNSLRAEDTAVYYCARDASIALPVTWFDPWGQGTLVTVSS

SEQ ID NO: 11390 - protein, 15 aa, Artificial Sequence
  Synthetic
ARDASIALPVTWFDP

SEQ ID NO: 11391 - protein, 108 aa, Artificial Sequence
  Synthetic
DIQMTQSPVSLSASVGDRVTITCRASQSISSYLNWYQQKPGKAPKLLIYAASTLQSGVPSRFSGSGSGTDFTLTISSLQPEDFATYYCQQSYSTPPWTFGQGTKVEIK

SEQ ID NO: 11392 - protein, 10 aa, Artificial Sequence
  Synthetic
QQSYSTPPWT

SEQ ID NO: 11393 - protein, 118 aa, Artificial Sequence
  Synthetic
EVQLVESGGGLIQPGGSLRLSCAASGFTVSSNFMSWVRQAPGKGLEWVSVIYSGGSTFCADSVKGRFTISRDNSKNTLYLQMNSLRAEDTAVYYCASQTWLRGAFDYWGQGTLVTVSS

SEQ ID NO: 11394 - protein, 12 aa, Artificial Sequence
  Synthetic
ASQTWLRGAFDY

SEQ ID NO: 11395 - protein, 111 aa, Artificial Sequence
  Synthetic
NFMLTQPHSVSESPGKTVTISCTGSSGSIASNYVQWYQQRPGSAPTTLIYEDNQRPSGVPDRFSGSIDSSSNSASLTISGLKTEDEADYYCQSYDIINHVVFGGGTTLTVL

SEQ ID NO: 11396 - protein, 10 aa, Artificial Sequence
  Synthetic
QSYDIINHVV

SEQ ID NO: 11397 - protein, 122 aa, Artificial Sequence
  Synthetic
EVQLVQSGAEVKKPGESLRITCKGSGYRFTRYWISWVRQMPGKGLEWMGRIDPGDSYTNYSPSFQGHVTISTDKSITTAYLQWSSLKASDTAMYYCARHRLELHHGAWLDPWGQGTLVTVSS

SEQ ID NO: 11398 - protein, 15 aa, Artificial Sequence
  Synthetic
ARHRLELHHGAWLDP

SEQ ID NO: 11399 - protein, 107 aa, Artificial Sequence
  Synthetic
DIQMTQSPSSLSASVGDRVTITCQASQDITNYLNWYQQKPGKAPKLLIYDASNLETGVPSRFSGSGSGTDFIFTISSLQPEDIATYYCQQYDNFSLTFGGGTKVEIK

SEQ ID NO: 11400 - protein, 9 aa, Artificial Sequence
  Synthetic
QQYDNFSLT

SEQ ID NO: 11401 - protein, 126 aa, Artificial Sequence
  Synthetic
EVQLVESGGGLVQPGGSLRLSCAASGFTFSKYWMSWVRQAPGQGLEWVANIKKDGSEKYYVDSVKGRFTISRDDAKNSLYLQMNSLRAEDTAVYYCARDTYYYDSSGYFINWFDPWGQGTLVTVSS

SEQ ID NO: 11402 - protein, 19 aa, Artificial Sequence
  Synthetic
ARDTYYYDSSGYFINWFDP

SEQ ID NO: 11403 - protein, 111 aa, Artificial Sequence
  Synthetic
QSVLTQPPSVSGAPGQRVTISCTGSSSNIGAGYDVHWYQQLPGTAPKLLLYDNSNRPSGVPDRFSGSKSGTSASLAITGLQAEDEADYYCQSYDSSLSGVVFGGGTKVTVL

SEQ ID NO: 11404 - protein, 11 aa, Artificial Sequence
  Synthetic
QSYDSSLSGVV

SEQ ID NO: 11405 - protein, 124 aa, Artificial Sequence
  Synthetic
QVQLVESGGGVVQPGRSLRLSCAASGFTFRSYAMHWVRQAPGKGLEWVAVISYDGSDKYYAESVKGRFTISRDNSKNTLYLQMNSLRTEDTAVYYCARDISCGGDCYPGGFDLWGRGTLVTVSS

SEQ ID NO: 11406 - protein, 17 aa, Artificial Sequence
  Synthetic
ARDISCGGDCYPGGFDL

SEQ ID NO: 11407 - protein, 108 aa, Artificial Sequence
  Synthetic
EIVLTQSPGTLSLSPGERATLSCRASQSVSSRYLAWYQQKPGQAPRLLINGASSRATGIPDRFSGSGSGTDFTLTISRLEPEDFAVYYCQQYGSSSWTFGQGTKVEIK

SEQ ID NO: 11408 - protein, 9 aa, Artificial Sequence
  Synthetic
QQYGSSSWT

SEQ ID NO: 11409 - protein, 122 aa, Artificial Sequence
  Synthetic
QVQLVESGGGLVKPGGSLRLSCAASGFTFSDYYMNWIRQAPGKGLEWVSYISHSSSYTNYADSVKGRFTISRDNAKNSLYLQMNSLRAEDTAVYYCAMGLTYSYDSSGYYYWGQGTLVTVSS

SEQ ID NO: 11410 - protein, 15 aa, Artificial Sequence
  Synthetic
AMGLTYSYDSSGYYY

SEQ ID NO: 11411 - protein, 111 aa, Artificial Sequence
  Synthetic
QSVLTQPPSASGSPGQSVTISCTGTSSDVGGYNYVSWYQQHPGKAPKLMIYEVSKRPSGVPDRFSGSKSGNTASLTVSGLQAEDEADYFCSSYAGSNNFVVFGGGTKLTVL

SEQ ID NO: 11412 - protein, 11 aa, Artificial Sequence
  Synthetic
SSYAGSNNFVV

SEQ ID NO: 11413 - protein, 120 aa, Artificial Sequence
  Synthetic
QVQLVQSGAEVKKPGASVKVSCKASGYTFTSYGISWVRQAPGQGLEWMGWISAYNGNTNYAQTFQGRVTMTTDISTSTAYMELRSLRSDDTAVYYCARVLGPLIVGVVYWGQGTLVTVSS

SEQ ID NO: 11414 - protein, 13 aa, Artificial Sequence
  Synthetic
ARVLGPLIVGVVY

SEQ ID NO: 11415 - protein, 112 aa, Artificial Sequence
  Synthetic
NFMLTQPHSVSESPGKTVTISCTGSSGSIASNYVQWYQQRPGSAPTTVIYEDNQRPSGVPDRFSGSIDSSSNSASLTIPGLKTEDEADYYCQSYDGSNHRWVFGGGTKLTVL

SEQ ID NO: 11416 - protein, 11 aa, Artificial Sequence
  Synthetic
QSYDGSNHRWV

SEQ ID NO: 11417 - protein, 118 aa, Artificial Sequence
  Synthetic
QVQLVESGGGVVQPGRSLRLSCAASGFTFSTYGMHWVRQAPGKGLEWVALIWSDGSNKFYADSVKGRFTISRDNSKNTLYLQMNSLRADDTAVYYCARGLAAAAVDYWGQGTLVTVSS

SEQ ID NO: 11418 - protein, 11 aa, Artificial Sequence
  Synthetic
ARGLAAAAVDY

SEQ ID NO: 11419 - protein, 108 aa, Artificial Sequence
  Synthetic
SYVLTQPPSVSVAPGKTARITCGGNHIGTNSVHWYQQRPGQAPLLVIYFDSDRPSGIPERFSGSNSGNTATLTITRVEAGDEADYYCQVWHSSSGHVVFGGGTKLTVL

SEQ ID NO: 11420 - protein, 11 aa, Artificial Sequence
  Synthetic
QVWHSSSGHVV

SEQ ID NO: 11421 - protein, 123 aa, Artificial Sequence
  Synthetic
QLQLQESGPGLVKPSETLSLTCTVSGGSINRYSYYWGWIRQPPGKGLEWIGSIYYSGSTYYNPSLESRVTISLDTSKNQFSLKLSSVTAADTAVYYCARGAGPYGDYLGFDPWGQGTLVTVSS

SEQ ID NO: 11422 - protein, 15 aa, Artificial Sequence
  Synthetic
ARGAGPYGDYLGFDP

SEQ ID NO: 11423 - protein, 109 aa, Artificial Sequence
  Synthetic
EIVLTQSPGTLSLSPGERATLSCRASQSVSSSYLAWYQQKPGQAPRLLMYGASSRATGIPDRFSGSGSGTDFTLTISRLEPEDFAVYYCQEYGSSPPYTFGQGTKLEIK

SEQ ID NO: 11424 - protein, 10 aa, Artificial Sequence
  Synthetic
QEYGSSPPYT

SEQ ID NO: 11425 - protein, 117 aa, Artificial Sequence
  Synthetic
EVQLVESGGGLIQPGGSLRLSCAASGFTISNIYMSWVRLAPGKGLEWVSVIYSGDTTYYADSVKGRFTISRDNSKNTLYLQMNSLRAADTAVYYCARLLSQGAFDIWGQGTMVTVSS

SEQ ID NO: 11426 - protein, 11 aa, Artificial Sequence
  Synthetic
ARLLSQGAFDI

SEQ ID NO: 11427 - protein, 110 aa, Artificial Sequence
  Synthetic
QSVLTQPPSASGSPGQSVTISCTGTSSDVGGYNYVSWYQQHPGKAPKVMIYEVTKRPSGVPDRFSGSKSGNTASLTVSGLQAEDEADYYCSSYAGSHKWVFGGGTKLTVL

SEQ ID NO: 11428 - protein, 10 aa, Artificial Sequence
  Synthetic
SSYAGSHKWV

SEQ ID NO: 11429 - protein, 122 aa, Artificial Sequence
  Synthetic
QVQLVQSGAEVKKPGASVKVSCKASGYTFTSYYIHWVRQAPGQGLEWMGIINPDGGSTTYAQKFQGRVTMTSDTSTNTVYMDLSSLRSEDTAVYYCARDLYLIPAVRCFDPWGQGTLVTVSS

SEQ ID NO: 11430 - protein, 15 aa, Artificial Sequence
  Synthetic
ARDLYLIPAVRCFDP

SEQ ID NO: 11431 - protein, 110 aa, Artificial Sequence
  Synthetic
EIVLTQSPATLSLSPGERATLSCRASQSVSSYLAWYQQKPGQAPRLLIYDASNRATGIPARFSGSGSGTDFTLTISSLEPEDFAVYYCQQRSNWPSGALTFGGGTKVEIK

SEQ ID NO: 11432 - protein, 12 aa, Artificial Sequence
  Synthetic
QQRSNWPSGALT

SEQ ID NO: 11433 - protein, 122 aa, Artificial Sequence
  Synthetic
QVQLVQSGAEVKKPGASVRVSCKASEFTFTNNYMHWVRQAPGQGLEWMGLINPNGGATTYAQKFQGRVTMTRDTSTSTVYMELSSLRSEDTAVYYCASAMIRGVAVWYMDVWGKGTTVTVSS

SEQ ID NO: 11434 - protein, 15 aa, Artificial Sequence
  Synthetic
ASAMIRGVAVWYMDV

SEQ ID NO: 11435 - protein, 106 aa, Artificial Sequence
  Synthetic
SYVLTQPPSVSVSPGQSASITCSGDKLGDKYAAWYQQKPGQSPVLVIYQDDKRPSGIPERFSGSNSGNTATLTISGTQAMDEADYYCQAWDSSTVVFGGGTKLTVL

SEQ ID NO: 11436 - protein, 9 aa, Artificial Sequence
  Synthetic
QAWDSSTVV

SEQ ID NO: 11437 - protein, 120 aa, Artificial Sequence
  Synthetic
QVQLQESGPGLVKPSETLSLTCTVSGGSISSYYWSWIRQPPGKGLEWIAYIYFSGNTNYNPSLKSRVTISVDTSKNQFSLKLSSVTAADTAVYYCARGVVPAAHVHMDVWGKGTTVTVSS

SEQ ID NO: 11438 - protein, 14 aa, Artificial Sequence
  Synthetic
ARGVVPAAHVHMDV

SEQ ID NO: 11439 - protein, 109 aa, Artificial Sequence
  Synthetic
QSVLTQPASVSGSPGQSITISCTGTSSDVGNYNLVSWYQHLPGKAPKLMIFEVSKRPSGVSHRFSGSKSGNTASLTISGVQAEDEADYYCCSYAGRSVVFGGGTKLTVL

SEQ ID NO: 11440 - protein, 9 aa, Artificial Sequence
  Synthetic
CSYAGRSVV

SEQ ID NO: 11441 - protein, 122 aa, Artificial Sequence
  Synthetic
QLQLQESGPGLVKPSETLSLICTVSGGSISSSSYYWGWIRQPPGKGLEWIGNIYYSGSTYYKPSLKSRVTISVDTSKNQFSLKLSSVTAADTAVYYCARFHRWSGHYYFDYWGQGTTVTVSS

SEQ ID NO: 11442 - protein, 14 aa, Artificial Sequence
  Synthetic
ARFHRWSGHYYFDY

SEQ ID NO: 11443 - protein, 109 aa, Artificial Sequence
  Synthetic
QSVLTQPRSVSGSPGQSVTISCTGTSSDVGGYDYVSWYQQHPGKAPKLMIYGVSERPSGVPDRFSGSKSGNTASLTISGLQAEDEADYYCCSYAGSDTLFGIGTKVTVL

SEQ ID NO: 11444 - protein, 9 aa, Artificial Sequence
  Synthetic
CSYAGSDTL

SEQ ID NO: 11445 - protein, 117 aa, Artificial Sequence
  Synthetic
EVQLVESGGGLVQPGGSLRLSCAASGITVSSNYMSWVRQAPGKGLEWVSVIYSGGSTFYADSVKGRFTISRDNSKNTLYLQMNSLRAEDTAVYYCARDAFNDAFDIWGQGTMVTVSS

SEQ ID NO: 11446 - protein, 11 aa, Artificial Sequence
  Synthetic
ARDAFNDAFDI

SEQ ID NO: 11447 - protein, 109 aa, Artificial Sequence
  Synthetic
  misc_feature (8)..(8): Xaa can be any naturally occurring amino acid
  misc_feature (10)..(10): Xaa can be any naturally occurring amino acid
DIQLTQSXVXLSASVGDRVTITCRASQGISTYLAWYQQKPGKAPNLLIYAASTLQSGVPSRFSGSGSGTEFTLTISSLQPEDFATYYCQQLNSYPPRFTFGPGTKVDIK

SEQ ID NO: 11448 - protein, 11 aa, Artificial Sequence
  Synthetic
QQLNSYPPRFT

SEQ ID NO: 11449 - protein, 128 aa, Artificial Sequence
  Synthetic
QVQLVQSGAEVRKPGSSVKVSCKTSGGTFSSYAISWVRQAPGQGLEWMGGIMPIYGTANYAQKFQDRVTIIADESTSTAYMELSSLRSEDTAVYYCARDLGYGGSGIRKSYIYYMDVWGKGTTVTVSS

SEQ ID NO: 11450 - protein, 21 aa, Artificial Sequence
  Synthetic
ARDLGYGGSGIRKSYIYYMDV

SEQ ID NO: 11451 - protein, 106 aa, Artificial Sequence
  Synthetic
DIQMTQSPSSLSASVGDRVTITCQASQDISNYLNWYQQKPGKAPKLLIYDASNLETGVPSRFSGSGSGTDFTFTISSLQPEDIATYYCQQYDNLPAFGGGTKVEIK

SEQ ID NO: 11452 - protein, 8 aa, Artificial Sequence
  Synthetic
QQYDNLPA

SEQ ID NO: 11453 - protein, 122 aa, Artificial Sequence
  Synthetic
QVQLVESGGGVVQPGRTLRLSCAASGFTFSSYVMHWVRQAPGKGLEWVAVIWYNGNNKYYADSVKGRFTISRDNSKNTLYVQMNSLRAEDTAVYYCAREAGDPTVTTEFDYWGQGTLVTVSS

SEQ ID NO: 11454 - protein, 15 aa, Artificial Sequence
  Synthetic
AREAGDPTVTTEFDY

SEQ ID NO: 11455 - protein, 111 aa, Artificial Sequence
  Synthetic
QSVLTQPPSVSGAPGQRVTISCTGSSSNIGAGYAVHWYQQLPGTAPKLLIYDNTNRPSGVPDRFSGSKSGTSASLAITGLQAEDEADYYCQSYDSSLSGYVFGTGTKVTVL

SEQ ID NO: 11456 - protein, 11 aa, Artificial Sequence
  Synthetic
QSYDSSLSGYV

SEQ ID NO: 11457 - protein, 132 aa, Artificial Sequence
  Synthetic
EVQLVESGGGLVKPGGSLRLSCAASGFTFSNAWMSWVRQAPGKGLEWVGRIKSKTDGGTTDYGAPLKGRFTISRDDSKNTLFLQMNSLKTEDTALYYCTTDRYPKLEYSSRTYYYYYYMDVWGKGTTVTVSS

SEQ ID NO: 11458 - protein, 23 aa, Artificial Sequence
  Synthetic
TTDRYPKLEYSSRTYYYYYYMDV

SEQ ID NO: 11459 - protein, 108 aa, Artificial Sequence
  Synthetic
  misc_feature (10)..(10): Xaa can be any naturally occurring amino acid
EIVLTQSPVXLSLSPGERATLSCRASQSVSSSLAWYQQKFGQAPRLLIYDTSNRATGIPARFSGSGSGTDFTLTISSLEPEDFAVYYCQLRSNWPPLTFGGGTKVEIK

SEQ ID NO: 11460 - protein, 10 aa, Artificial Sequence
  Synthetic
QLRSNWPPLT

SEQ ID NO: 11461 - protein, 126 aa, Artificial Sequence
  Synthetic
QVQLQESGPGLVKPSQTLSLTCSVSGGSISSDDYYWSWIRQHPGKGLEWIGYIYYSGGTYSNPSLKSRVSISLDMSKNQLSLKLTSVTAADTAIYYCAGQRQQLVPPYYYYFLDVWGKGTTVTVSS

SEQ ID NO: 11462 - protein, 18 aa, Artificial Sequence
  Synthetic
AGQRQQLVPPYYYYFLDV

SEQ ID NO: 11463 - protein, 107 aa, Artificial Sequence
  Synthetic
  misc_feature (8)..(8): Xaa can be any naturally occurring amino acid
  misc_feature (10)..(10): Xaa can be any naturally occurring amino acid
DIQMTQSXVXLSASVGDRVTITCRASQSISSHLNWYQQKPGKAPKLLIYATSILQSGVPSRFSGSGSGTDFTLTIGSLQPEDFATYYCQQSYSGLRAFGPGTKLEIK

SEQ ID NO: 11464 - protein, 9 aa, Artificial Sequence
  Synthetic
QQSYSGLRA

SEQ ID NO: 11465 - protein, 126 aa, Artificial Sequence
  Synthetic
QVQLVQSGAEVKKPGSSVRVSCKASGGTFSTYAISWVRQAPGQGLEWMGGTIPVFGTANYAQKFQGRVTITADESTSTAYMELSSLKSEDTAVYYCATYCSGGGCLTYHHYYMDVWGKGTTVTVSS

SEQ ID NO: 11466 - protein, 19 aa, Artificial Sequence
  Synthetic
ATYCSGGGCLTYHHYYMDV

SEQ ID NO: 11467 - protein, 107 aa, Artificial Sequence
  Synthetic
SYVLTQPPSVSVAPGKTARITCGGNNIGSKSVHWYQQKPGQAPVLVIYYDSDRPSGIPERFSGSNSGNTATLTISRVEAGDEADYYCQVWDSTSDWVFGGGTKLTVL

SEQ ID NO: 11468 - protein, 10 aa, Artificial Sequence
  Synthetic
QVWDSTSDWV

SEQ ID NO: 11469 - protein, 127 aa, Artificial Sequence
  Synthetic
QVQLVQSGAEVKKPGSSVKVSCKASGGTFSSYAISWVRQAPGQGLEWMGRIIPILGIANYAQMFQGRVTITADKSTSTAYMELSSLRSEDTAVFYCARDDPDYSNYGDLTPGAFDIWGQGTMVTVSS

SEQ ID NO: 11470 - protein, 20 aa, Artificial Sequence
  Synthetic
ARDDPDYSNYGDLTPGAFDI

SEQ ID NO: 11471 - protein, 108 aa, Artificial Sequence
  Synthetic
EIVMTQSPATLSVSPGERATLSCRASQSVSSNLAWYQQKPGQAPRLLIYGASTRATGIPARFSGSGSGTEFTLTISSLQSEDSAVYYCQQYSNWPPYAFGQGTKLEIK

SEQ ID NO: 11472 - protein, 10 aa, Artificial Sequence
  Synthetic
QQYSNWPPYA

SEQ ID NO: 11473 - protein, 122 aa, Artificial Sequence
  Synthetic
QVQLVQSGAEVKKPGASVKLSCKASGYILTSYYMHWVRQAPGQGLEWMGIINPDGGSTTYAQKFQGRVTMTSDTSTSTLYMELSSLRSEDTAVYYCARDWALVPAAIGFDIWGQGTMVTVSS

SEQ ID NO: 11474 - protein, 15 aa, Artificial Sequence
  Synthetic
ARDWALVPAAIGFDI

SEQ ID NO: 11475 - protein, 111 aa, Artificial Sequence
  Synthetic
QSVLTQPASVSGSPGQSITISCTGTSSDVGSYNLVSWYQQYPGKAPKLMIHEASKRPSGVSNRFSGSKSGNTASLTISGLQAEDEADYYCCSYAGSKSSFVFGTGTKVTVL

SEQ ID NO: 11476 - protein, 11 aa, Artificial Sequence
  Synthetic
CSYAGSKSSFV

SEQ ID NO: 11477 - protein, 120 aa, Artificial Sequence
  Synthetic
QVQLVESGGGLVKPGGSLRLSCAASGFTFSDYYMTWIRQAPGKGLEWVSYISTTSSYTNYADSVKGRFTISRDNAKNSLYLQMNSLRAEDTATYYCASSGNYYHDDFDYWGQGTQVTVSS

SEQ ID NO: 11478 - protein, 13 aa, Artificial Sequence
  Synthetic
ASSGNYYHDDFDY

SEQ ID NO: 11479 - protein, 107 aa, Artificial Sequence
  Synthetic
EIVLTQSPATLSLSPGERATLSCRASQNVSSYLAWYQQKPGQAPRLLIYDASNRATGIPARFSGGGSGTDFTLTISSLEPEDFAVYYCQQRSNWPPTFGQGTKVEVK

SEQ ID NO: 11480 - protein, 9 aa, Artificial Sequence
  Synthetic
QQRSNWPPT

SEQ ID NO: 11481 - protein, 122 aa, Artificial Sequence
  Synthetic
QVQLVESGGGLVKPGGSLRLSCAASGFTFSDYYMNWIRQAPGKGLEWVSYISSSSSYTNYADSVKGRFTISRDNAKSSLYLQMNSLRAEDTAVYYCARGLTYNYDSSGYYYWGQGTLVTVSS

SEQ ID NO: 11482 - protein, 15 aa, Artificial Sequence
  Synthetic
ARGLTYNYDSSGYYY

SEQ ID NO: 11483 - protein, 111 aa, Artificial Sequence
  Synthetic
QSALTQPPSASGSPGQSVTISCTGTSSDVGGYDYVSWYQQHPGKAPKLMIYEVSKRPSGVPDRFSGSKSGNTASLTVSGLQAEDEADYYCSSYAGSNNFVVFGGGTKLTVL

SEQ ID NO: 11484 - protein, 11 aa, Artificial Sequence
  Synthetic
SSYAGSNNFVV

SEQ ID NO: 11485 - protein, 118 aa, Artificial Sequence
  Synthetic
EVQLVESGGGLIQPGGSLRLSCAASGFTVSSNYMSWVRQAPGKGLEWVSVIYSGGTTYYADSVKGRFTISRDNSKNTLYLQMNSLRAEDTAVYYCARDLQEGGYLDYWGQGTLVTVSS

SEQ ID NO: 11486 - protein, 12 aa, Artificial Sequence
  Synthetic
ARDLQEGGYLDY

SEQ ID NO: 11487 - protein, 109 aa, Artificial Sequence
  Synthetic
  misc_feature (8)..(8): Xaa can be any naturally occurring amino acid
  misc_feature (10)..(10): Xaa can be any naturally occurring amino acid
DIQLTQSXVXLSASVGDRVTITCRASQGISSYLAWYQQKPGKAPKLLIYAASTLQSGVPSRFSGSGSGTAFTLTISSLQPEDFATYYCQHLNSYPPGYTFGQGTKLEIK

SEQ ID NO: 11488 - protein, 11 aa, Artificial Sequence
  Synthetic
QHLNSYPPGYT

SEQ ID NO: 11489 - protein, 126 aa, Artificial Sequence
  Synthetic
QVQLVESGGGVVQPGRSLRLSCAASGFTFSRYGMHWVRQAPGKGLEWVAVISYDGSYIHYADSVKGRFTISRDNSKNTLYLQMNSLRAEDTAVYYCAKKGEYYCSGDCSLGYFDYWGQGTLVTVSS

SEQ ID NO: 11490 - protein, 19 aa, Artificial Sequence
  Synthetic
AKKGEYYCSGDCSLGYFDY

SEQ ID NO: 11491 - protein, 107 aa, Artificial Sequence
  Synthetic
DIQMTQSPSSLSASVGDRVTITCQASQDINNYLNWYQQKPGKAPKLLIYDASNLETGVPSRFSGSGSGTDFTFTISSLQPEDIATYYCQQYDNLPVTFGPGTKVDIK

SEQ ID NO: 11492 - protein, 9 aa, Artificial Sequence
  Synthetic
QQYDNLPVT

SEQ ID NO: 11493 - protein, 127 aa, Artificial Sequence
  Synthetic
EVQLVESGGGLVQPGGSLRLSCAVSGFTFSSYDMHWVRQAPGKGLEWVSVIGTAGDAYYPGSVKGRFTISRENAKNSLYLQMNSLRAGDTAVYYCVRGNVESQLLSRYYYYYYMDVWGKGTTVTVSS

SEQ ID NO: 11494 - protein, 21 aa, Artificial Sequence
  Synthetic
VRGNVESQLLSRYYYYYYMDV

SEQ ID NO: 11495 - protein, 108 aa, Artificial Sequence
  Synthetic
  misc_feature (48)..(48): Xaa can be any naturally occurring amino acid
DIQMTQSPSSLSASVGDRVTITCRASQSISRYLNWYQQKPGKAPKLLXYDASSLQAGVPSRFSGSGSGTDFTFTISSLQPEDFATYYCQQSYSTLEYTFGQGTKLEIK

SEQ ID NO: 11496 - protein, 10 aa, Artificial Sequence
  Synthetic
QQSYSTLEYT

SEQ ID NO: 11497 - protein, 124 aa, Artificial Sequence
  Synthetic
QVQLQESGPGLVKPSQTLSVTCTVSGGSISSGGYYWSWIRQHPGKGLEWIGYIYFSGNTYYNPSLKSRVTISVDTSKNQFSLKLSSVTAADTALYYCARLINSRGWYGGNFDYWGQGTLVTVSS

SEQ ID NO: 11498 - protein, 16 aa, Artificial Sequence
  Synthetic
ARLINSRGWYGGNFDY

SEQ ID NO: 11499 - protein, 107 aa, Artificial Sequence
  Synthetic
EIVLTQSPATLSLSPGERATLSCRASQSVSSYLAWYQQKPGQAPRLLIYDTSNRATGIPARFSGSGSGTDFTLTISSLEPEDFAVYYCQLRSNWLLTFGPGTKVDIK

SEQ ID NO: 11500 - protein, 9 aa, Artificial Sequence
  Synthetic
QLRSNWLLT

SEQ ID NO: 11501 - protein, 124 aa, Artificial Sequence
  Synthetic
QLQLQESGPGLVKPSETLSLTCTVSGGSISGSTYYWGWIRQPPGKGLEWIGSIYYSGSTYYSPSLKSRVTISVDTSKNQFSLKLSSVTAADTAVYYCATYVWWSYRYGGGFDYWGQGTLVTVSS

SEQ ID NO: 11502 - protein, 16 aa, Artificial Sequence
  Synthetic
ATYVWWSYRYGGGFDY

SEQ ID NO: 11503 - protein, 110 aa, Artificial Sequence
  Synthetic
QSVLTQPASVSGSPGQSITISCTGTSSDVGSYNLVSWYQHHPGKAPKLMIYEGSQRPSGVSNRFSGSKSGNTASLTISGLQAEDEADYYCCSYVGSSTVIFGGGTKLTVL

SEQ ID NO: 11504 - protein, 10 aa, Artificial Sequence
  Synthetic
CSYVGSSTVI

SEQ ID NO: 11505 - protein, 118 aa, Artificial Sequence
  Synthetic
QVQLVQSGAEVKKPGSSVKVSCKASGGTFSTYVITWVRQAPGQGLAWMGGIIPIFDTPNYAQMFQGRVTITADESTSTAYMELSSLRSEDTAVYFCVLTTQWDLLPRWGQGTLVTVSS

SEQ ID NO: 11506 - protein, 11 aa, Artificial Sequence
  Synthetic
VLTTQWDLLPR

SEQ ID NO: 11507 - protein, 109 aa, Artificial Sequence
  Synthetic
EIVLTQSPGTLSLSPGDRATLSCRASQSVNSNYLAWYQQKPGQAPRLLIYGASSRATGIPDRFSGMGAGTDFTLTISRLEPEDFAVYYCHQYGISPRGTFGQGTKVEIK

SEQ ID NO: 11508 - protein, 10 aa, Artificial Sequence
  Synthetic
HQYGISPRGT

SEQ ID NO: 11509 - protein, 126 aa, Artificial Sequence
  Synthetic
QLQLQESGPGLVKPSETLSLTCTVSGGSISSTFYYWGWIRQPPGKGLEWIGSIYYSGSTYYNPSLKSRVTISVDTSKNQFSLKLSSVTAADTAVYYCARFVRQLSSDYYACAFDIWGQGTMVTVSS

SEQ ID NO: 11510 - protein, 18 aa, Artificial Sequence
  Synthetic
ARFVRQLSSDYYACAFDI

SEQ ID NO: 11511 - protein, 108 aa, Artificial Sequence
  Synthetic
QSVLTQPASVSGSPGQSITISCTGTSSDVGSYDLVSWYQQHPGKAPKLMIYEVSYRPSGVSNRFSGSKSGNTASLTISGLQAEDEADYYCCSYAGSVLFGGGTKLTVL

SEQ ID NO: 11512 - protein, 8 aa, Artificial Sequence
  Synthetic
CSYAGSVL

SEQ ID NO: 11513 - protein, 116 aa, Artificial Sequence
  Synthetic
EVQLVESGGGLIQPGGSLRLSCAASGFTVSSNFMSWVRQAPGKGLEWVSVIYSGGSTDYADSVKGRFTISRDNSKNTLYVQMNSLRVEDTAVYYCARVVSDAFDIWGQGTMVTVSS

SEQ ID NO: 11514 - protein, 10 aa, Artificial Sequence
  Synthetic
ARVVSDAFDI

SEQ ID NO: 11515 - protein, 107 aa, Artificial Sequence
  Synthetic
DIQMTQSPSTLSASVGDRVTITCRASQSISNWLAWYQQKPGKAPKLLIYKASILESAVPSRFSGSGSGTEFTLTISSLQPDDFATYYCQHYDSYRYTFGQGTKLEIK

SEQ ID NO: 11516 - protein, 9 aa, Artificial Sequence
  Synthetic
QHYDSYRYT

SEQ ID NO: 11517 - protein, 114 aa, Artificial Sequence
  Synthetic
EVQLVESGGGLVQPGGSLRLSCAASGLTVSSNYMSWVRQAPGKGLEWVSVIYSGGSTYYADSVKGRFTISRDNSKNTLYLQMNSLRAEDTAVYYCARDLRDTIWGQGTMVTVSS

SEQ ID NO: 11518 - protein, 8 aa, Artificial Sequence
  Synthetic
ARDLRDTI

SEQ ID NO: 11519 - protein, 107 aa, Artificial Sequence
  Synthetic
DIQMTQSPSSLSASVGDRVAITCQASQDINIYLNWYQQKPGKAPKLLINGASNLETGVPSRFSGSGSGTDFTFTISSLQPEDIATYYCQQSDNPPLTFGGGTKVEIK

SEQ ID NO: 11520 - protein, 9 aa, Artificial Sequence
  Synthetic
QQSDNPPLT

SEQ ID NO: 11521 - protein, 116 aa, Artificial Sequence
  Synthetic
  misc_feature (33)..(33): Xaa can be any naturally occurring amino acid
  misc_feature (36)..(36): Xaa can be any naturally occurring amino acid
  misc_feature (48)..(48): Xaa can be any naturally occurring amino acid
QVQLQESGPGLVKPSETLSLTCTVSGDSINNYXGSXIRQPPGKGLEWXGYLCFSGSTNYNPSLKSRGTISVDTSKSQISLKLSSVTAADTAVYYCAREKLDAFDIWGQGTMVTVSS

SEQ ID NO: 11522 - protein, 10 aa, Artificial Sequence
  Synthetic
AREKLDAFDI

SEQ ID NO: 11523 - protein, 109 aa, Artificial Sequence
  Synthetic
EIVLTQSPGTLSLSPGERATLSCRASQSVSSSYLAWYQQKPGQAPRLLIYGASSRATGIPDRFSGSGSGTDFTLTISRLEPEDFAVYYCQQYGSSQGATFGPGTKVEIK

SEQ ID NO: 11524 - protein, 10 aa, Artificial Sequence
  Synthetic
QQYGSSQGAT

SEQ ID NO: 11525 - protein, 122 aa, Artificial Sequence
  Synthetic
EVQLVESGGGLVKPGGSLRLSCSASGFTFNIYNMNWVRQAPGKGLEWVSSITSSSNYIYYADSVKGRFTISRDNAKNSLYLQMNSLRAEDTAVYYCATAYRLLSVVYAFDLWGQGTMVTVSS

SEQ ID NO: 11526 - protein, 15 aa, Artificial Sequence
  Synthetic
ATAYRLLSVVYAFDL

SEQ ID NO: 11527 - protein, 107 aa, Artificial Sequence
  Synthetic
DIQMTQSPSSLSASVGDRVTITCRASQNISTYLNWYQQKAGKAPKILIYAASSLQSGVPSRFSGSGSGTDFTLTISSLQPEDFATYYCQQSYNTPRTFGQGTKVEIK

SEQ ID NO: 11528 - protein, 9 aa, Artificial Sequence
  Synthetic
QQSYNTPRT

SEQ ID NO: 11529 - protein, 119 aa, Artificial Sequence
  Synthetic
EVQLVQSGAEVKKPGESLKISCKGSGYSFTSYWIGWVRQMPGKGLEWMGIFNPGDSDTRYSPSFQGQVTISADKSITTAYLQWSSLKASDTAMYYCATTKWVRGHLDYWGQGTLVTVSS

SEQ ID NO: 11530 - protein, 12 aa, Artificial Sequence
  Synthetic
ATTKWVRGHLDY

SEQ ID NO: 11531 - protein, 111 aa, Artificial Sequence
  Synthetic
NFMLTQPHSVSESPGKTVTISCTGSSGSIASNYVQWYQQRPGSAPTTVIYEDNQRPSGVPDRFSGSIDSSSNSASLTISGLKTEDEADYYCQSYDSTTHWVFGGGTKLTVL

SEQ ID NO: 11532 - protein, 10 aa, Artificial Sequence
  Synthetic
QSYDSTTHWV

SEQ ID NO: 11533 - protein, 129 aa, Artificial Sequence
  Synthetic
EVQLVESGGGLIQPGGSLRLSCAASGFTVSGDYMTYMTWVRQAPGKGLEWVSVIYSGGSTYYADSVKGRFTISRDNSKNTLYLQMNSLRAEDTAVYYCARGGYDYVWGSYLQSGAFDIWGQGTMVTVSS

SEQ ID NO: 11534 - protein, 20 aa, Artificial Sequence
  Synthetic
ARGGYDYVWGSYLQSGAFDI

SEQ ID NO: 11535 - protein, 110 aa, Artificial Sequence; identical to SEQ ID NO: 1787
  Synthetic

SEQ ID NO: 11536 - protein, 10 aa, Artificial Sequence
  Synthetic
SSYAGSNNWV

SEQ ID NO: 11537 - protein, 120 aa, Artificial Sequence
  Synthetic
EVQLLESGGGLVQPGGSLRLSCADSGFTFSSYAMTWVRQAPGRGLEWVSTISHHAGSTYYADSVKGRFTISRDNSKNTLYLQMNSLRAEDTAVYYCAKGGSYGDWYFDYWGQGTLVSVSS

SEQ ID NO: 11538 - protein, 13 aa, Artificial Sequence
  Synthetic
AKGGSYGDWYFDY

SEQ ID NO: 11539 - protein, 109 aa, Artificial Sequence
  Synthetic
QSVLTQPRSVSGSPGQSVTISCTGTSSDVGAYNYVSWYQQHPGKAPKFMIFDVSKRPSGVPDRFSGSKSGNTASLTISGLQAEDEADYYCCSYAGTYWVFGGGTKLTVL

SEQ ID NO: 11540 - protein, 9 aa, Artificial Sequence
  Synthetic
CSYAGTYWV

SEQ ID NO: 11541 - protein, 128 aa, Artificial Sequence
  Synthetic
EVQLVESGGGLVQPGRSLRLSCTASGFTFGDYALNWFRQAPGKGLEWVGFIRSKAYGGTTQHAASVKGRFTISRDESKSIAFLQMSSLKTEDTAVYYCARGTWDCSGARCQWGIFDYWGQGTLVTVSS

SEQ ID NO: 11542 - protein, 19 aa, Artificial Sequence
  Synthetic
ARGTWDCSGARCQWGIFDY

SEQ ID NO: 11543 - protein, 106 aa, Artificial Sequence
  Synthetic
EIVMTQSPATLSVSPGERATLSCRASQSVSINLAWYQQKPGQAPRLLIYGASTRATGIPARFSGSGSGTEFTLTISSLQSEDFAVYYCQQYNNWFTFGPGTKVDIK

SEQ ID NO: 11544 - protein, 8 aa, Artificial Sequence
  Synthetic
QQYNNWFT

SEQ ID NO: 11545 - protein, 121 aa, Artificial Sequence
  Synthetic
QVQLQESGPGLVKPSQTLSLTCTVSGGSISSGDYYWSWIRQPPGKGLEWIGYIYYSGSTYYNPSLKSRVTISVDTSKNQFSLKLSSVTAADTAVYYCASLRRLMEYSFDYWGQGTLVTVSS

SEQ ID NO: 11546 - protein, 13 aa, Artificial Sequence
  Synthetic
ASLRRLMEYSFDY

SEQ ID NO: 11547 - protein, 109 aa, Artificial Sequence
  Synthetic
QSVLTQPASVSGSPGQSITISCTGTSSDVGSYNLVSWYQQHPGKAPKLMIYEGSKRPSGVSNRFSGSKSGNTASLTISGLQAEDEADYYCCSYAGNNTLFGGGTKLTVL

SEQ ID NO: 11548 - protein, 9 aa, Artificial Sequence
  Synthetic
CSYAGNNTL

SEQ ID NO: 11549 - protein, 120 aa, Artificial Sequence
  Synthetic
QVQLVESGGGVVQPGRSLRLSCAASGFTFSSYGMHWVRQAPGKGLEWVAVIWDDGSNKHYADSVKGRFTISRDNSKNTLHLQMNSLRAEDTAVYFCARDQGRVVTHFDYWGQGALVTVSS

SEQ ID NO: 11550 - protein, 13 aa, Artificial Sequence
  Synthetic
ARDQGRVVTHFDY

SEQ ID NO: 11551 - protein, 108 aa, Artificial Sequence
  Synthetic
DIQMTQSPSSLSASVGDRVTITCRASQSISSYLNWYQQKPGKAPKLLIYEASSLQSGVPPRFSGSGSGTDFTLTISSLQPEDFATYYCQQSYSTPPWTFGQGTKVEIK

SEQ ID NO: 11552 - protein, 10 aa, Artificial Sequence
  Synthetic
QQSYSTPPWT

SEQ ID NO: 11553 - protein, 125 aa, Artificial Sequence
  Synthetic
EVQLVESGGGLVQPGGSLRLSCTASGFTLSTHSMNWVRQAPGKGLEWISYISKTGTTIYYADSVKGRFTISRDIAENSLYLHMNNLRDEDTAVYYCARNPYDILTGYYSFYFDLWGQGTLVPVSS

SEQ ID NO: 11554 - protein, 18 aa, Artificial Sequence
  Synthetic
ARNPYDILTGYYSFYFDL

SEQ ID NO: 11555 - protein, 106 aa, Artificial Sequence
  Synthetic
DIQMTQSPSTLYASVGDRVTITCRASQNINRWLAWYQQKPGKAPKLLIYKASSLESGVPSRFSGSGSGTEFTLTISSLQPDDFANYYCQQYNTHWTFGQGTKVEIK

SEQ ID NO: 11556 - protein, 8 aa, Artificial Sequence
  Synthetic
QQYNTHWT

SEQ ID NO: 11557 - protein, 121 aa, Artificial Sequence
  Synthetic
QVQLVESGGGVVQPGRSLRLSCAASGFTFSSYGMHWVRQAPGKGLEWVAVISYDGSNKYYADSVKGRFTISRDNSKNTLYLQMNSLRAEDTAVYYCAKDMYYDILIELDYWGQGTLVTVSS

SEQ ID NO: 11558 - protein, 14 aa, Artificial Sequence
  Synthetic
AKDMYYDILIELDY

SEQ ID NO: 11559 - protein, 107 aa, Artificial Sequence
  Synthetic
DIQMTQSPSSLSASVGDRVTITCRASQSISSYLNWYQQKPGKAPKLLIYAASSLQSGVPSRFSGSGSGTDFTLTISSLQPEDFATYYCQQSYSTPYTFGQGTKLEIK

SEQ ID NO: 11560 - protein, 9 aa, Artificial Sequence
  Synthetic
QQSYSTPYT

SEQ ID NO: 11561 - protein, 122 aa, Artificial Sequence
  Synthetic
QVQLVQSGAEVKKPGASVKVSCKASGYTFSSYYIHWVRQAPGQGLEWMGIINPSGGSTSYAQKFQGRVTMTRDTSTSTAYMELSSLRSEDTAVYYCARDIAGVPAVIGLDPWGQGTLVTVSS

SEQ ID NO: 11562 - protein, 15 aa, Artificial Sequence
  Synthetic
ARDIAGVPAVIGLDP

SEQ ID NO: 11563 - protein, 109 aa, Artificial Sequence
  Synthetic
EIVLTQSPATLSLSPGERATLSCRASQSVSSYLAWYQQKPGQAPRLLIYDASNRATGIPARFSGSGSGTDFTLTISSLEPEDFAVYYCQQRSNWPRRLTFGGGTKVEIK

SEQ ID NO: 11564 - protein, 11 aa, Artificial Sequence
  Synthetic
QQRSNWPRRLT

SEQ ID NO: 11565 - protein, 120 aa, Artificial Sequence
  Synthetic
EVQLVESGGGLVQPGGSLRLSCAASGFTFSNFWMNWVRQAPGKGLEWVANIKQDGSDKYYVDSVKGRFTISRDNTKNSLYLQMNSLRAEDTAVYYCARGRLGKFAGFDYWGQGTLVTVSS

SEQ ID NO: 11566 - protein, 13 aa, Artificial Sequence
  Synthetic
ARGRLGKFAGFDY

SEQ ID NO: 11567 - protein, 113 aa, Artificial Sequence
  Synthetic
QFVLTQPPSASASLGASVTLTCTLSSGYSNYKVDWYQQRPGKGPRFVMRVGTGGIVGSKGDGIPDRFSVLGSGLNRYLTIKNIQEEDESDYHCGADHGSGSALFGGGTKLTVL

SEQ ID NO: 11568 - protein, 10 aa, Artificial Sequence
  Synthetic
GADHGSGSAL

SEQ ID NO: 11569 - protein, 125 aa, Artificial Sequence
  Synthetic
QLQLQESGPGLVKPSETLSLTCTVSGGSISSSSYYWGWIRQPPGKGLEWIGNIYYSGSTYYNPSLKSRVTLSVDTSKNHFSLKLSSVTAADTAVYYCARFHRFYSSSLTAAFDYWGQGTLVTVSS

SEQ ID NO: 11570 - protein, 17 aa, Artificial Sequence
  Synthetic
ARFHRFYSSSLTAAFDY

SEQ ID NO: 11571 - protein, 109 aa, Artificial Sequence
  Synthetic
QSVLTQPPSASGSPGQSVTISCTGTSSDVGGYTYVSWYQQHPGKAPKLMIYEVSKRPSGVPDRFSGSKSGNTASLTVSGLQAEDEADYYCSSYAGTYYVFGTGTKVTVL

SEQ ID NO: 11572 - protein, 9 aa, Artificial Sequence
  Synthetic
SSYAGTYYV

SEQ ID NO: 11573 - protein, 124 aa, Artificial Sequence
  Synthetic
EVQLVESGGGLVKAGGSLRLSCAASGFTFSSYSMNWVRQAPGKGLEWVSSISGSSGNIYYADSLKGRFTISRDNAKNSLYLQMNSLRAEDTAVYYCARDQCGSSSCPAGEYMDVWGRGTTVTVT

SEQ ID NO: 11574 - protein, 18 aa, Artificial Sequence
  Synthetic
ARDQCGSSSCPAGEYMDV

SEQ ID NO: 11575 - protein, 105 aa, Artificial Sequence
  Synthetic
SYVLTQPPSVSVAPGKTARITCGGNNIGSKSAHWYQRKPGQAPVLVIYYDTDRPSGIPERFSGSNSGNTATLTISRVEAGDEADYYCQVWDGGVVFGGGTKLTVL

SEQ ID NO: 11576 - protein, 8 aa, Artificial Sequence
  Synthetic
QVWDGGVV

SEQ ID NO: 11577 - protein, 120 aa, Artificial Sequence
  Synthetic
EVQLVQSGAEVKKPGESLKISCKGSGYSFISHWIGWVRQMPGKGLEWMGIIYPGDSDTTYSPSFQGQVTISADKSISTAYLQWSSLKASDTAMYYCARLDSGKYGWFDPWGQGTLVTVSS

SEQ ID NO: 11578 - protein, 13 aa, Artificial Sequence
  Synthetic
ARLDSGKYGWFDP

SEQ ID NO: 11579 - protein, 110 aa, Artificial Sequence
  Synthetic
  misc_feature (49)..(49): Xaa can be any naturally occurring amino acid
  misc_feature (81)..(81): Xaa can be any naturally occurring amino acid
  misc_feature (85)..(85): Xaa can be any naturally occurring amino acid
  misc_feature (88)..(88): Xaa can be any naturally occurring amino acid
QSAMTQPPSASGTPGQRVTMSCCGSSSNIGSNTLNWYQQLPGTAPKLLXYSNNQRPSGVPDRFSGSKSGTSASLAISGLQXEDEXDYXCAAWDDSLNGWVFGGGTKLTVL

SEQ ID NO: 11580 - protein, 11 aa, Artificial Sequence
  Synthetic
AAWDDSLNGWV

SEQ ID NO: 11581 - protein, 123 aa, Artificial Sequence
  Synthetic
QLQLQESGPGLVKPSETLSLTCTVSGGSISSSSYCWGWIRQPPGKGLEWIGSIYYTGNTYYNPSLQSRVTISVDTSKNHFSLKLSSVTAADTAVYYCARHPNPLTTVVYFDYWGQGTLVTVSS

SEQ ID NO: 11582 - protein, 15 aa, Artificial Sequence
  Synthetic
ARHPNPLTTVVYFDY

SEQ ID NO: 11583 - protein, 111 aa, Artificial Sequence
  Synthetic
QSVLTQPPSVSGAPGQRVTISCTGSSSNIGAYYDVHWYQQLPGTAPKLLIYSNNNRPSGVPDRFSGSESGSSASLAITGLQAEDEAYYYCQSYDDSLSSWVFGGGTKLTVL

SEQ ID NO: 11584 - protein, 11 aa, Artificial Sequence
  Synthetic
QSYDDSLSSWV

SEQ ID NO: 11585 - protein, 121 aa, Artificial Sequence
  Synthetic
EVQLVESGGGLVQPGGSLRLSCAASGFTFSTDWMHWVRQAPGKGLVWVSRINGDGSSTSYADSVKGRFTISRDNAKNTLYLQMNSLRAEDTAVYYCARDGDIVVGDYFDYWGQGTLVTVSS

SEQ ID NO: 11586 - protein, 14 aa, Artificial Sequence
  Synthetic
ARDGDIVVGDYFDY

SEQ ID NO: 11587 - protein, 107 aa, Artificial Sequence
  Synthetic
DIQMTQSPSSLSASVGDRVTITCRTSQSISKYLNWYQQKPGKAPKLLIYAASSLQSGVPSRFSGSGSGTDFTLTISSLQPEDFATYYCQQSHSTPLTFGQGTKVEIK

SEQ ID NO: 11588 - protein, 9 aa, Artificial Sequence
  Synthetic
QQSHSTPLT

SEQ ID NO: 11589 - protein, 131 aa, Artificial Sequence
  Synthetic
EVQLVESGGGLVKPGGSLRLSCAASGFTFSNAWMTWVRQAPGKGLEWVGRIKSKTEGGTTDYAAPVKGRFIISRDDSKNTLYLQMNSLKTEDTAVYYCTTTSGVVVPAAIWGRQIYYMDVWGKGTTVTVSS

SEQ ID NO: 11590 - protein, 22 aa, Artificial Sequence
  Synthetic
TTTSGVVVPAAIWGRQIYYMDV

SEQ ID NO: 11591 - protein, 110 aa, Artificial Sequence
  Synthetic
QSVLTQPPSVSEAPRQRVTISCSGSISNIGNNAVNWYQQLPGKAPKLLIYYDDLLPSGVSDRFSGSKSGTSASLAISGLQSEDEADYYCAAWDDSLNGVVFGGGTKLTVL

SEQ ID NO: 11592 - protein, 11 aa, Artificial Sequence
  Synthetic
AAWDDSLNGVV

SEQ ID NO: 11593 - protein, 125 aa, Artificial Sequence
  Synthetic
QVQLVESGGGVVQPGKSLRLSCAASGSMFSIYGMHWVRQAPGKGLEWVALIWYDGNNKYYADSVKGRFTISRDNSKNTLYLQMNSLRAEDTAVYYCAREGLYFDLGINYYYMDVWGKGTTVTVSS

SEQ ID NO: 11594 - protein, 18 aa, Artificial Sequence
  Synthetic
AREGLYFDLGINYYYMDV

SEQ ID NO: 11595 - protein, 108 aa, Artificial Sequence
  Synthetic
DIQMTQSPSSLSASVGDRVTITCRASQSISSYLNWYQQKPGKAPKLLIYAASSLQSGVPSRFSGSGSGTDFTLTISSLQPEDFAIYYCQQSYSTPPWTFGQGTKLEIK

SEQ ID NO: 11596 - protein, 10 aa, Artificial Sequence
  Synthetic
QQSYSTPPWT

SEQ ID NO: 11597 - protein, 117 aa, Artificial Sequence
  Synthetic
EVQLVESGGGLIQPGGSLRLSCAASGVIVSSNYMSWVRQAPGMGLEWVSVIYPGGSTFYADSVRGRFTISRDNSMNTLYLQMNSLRGEDTAVYYCARDYGDWYFDLWGRGTLVTVSS

SEQ ID NO: 11598 - protein, 11 aa, Artificial Sequence
  Synthetic
ARDYGDWYFDL

SEQ ID NO: 11599 - protein, 107 aa, Artificial Sequence
  Synthetic
EIVMTQSPATLSVSPGERATLSCRASQTVSSNLAWYQQKPGQAPRLLIYGASTRATGIPARFSGSGSGTEFTLTISSLQSEDYAVYYCQQYYNWPRTFGQGTKVEIK

SEQ ID NO: 11600 - protein, 9 aa, Artificial Sequence
  Synthetic
QQYYNWPRT

SEQ ID NO: 11601 - protein, 121 aa, Artificial Sequence
  Synthetic
QVQLVQSGAEVKKPGASVKISCKASGYTFTNSYMHWVRQAPGQGLEWMGIINPSGGSTTYAQKFQGRVTMTRDTSTTTVYMELSNLRSEETAVYYCAMHHYDVLTGYLDYWGQGTLVTVSS

SEQ ID NO: 11602 - protein, 14 aa, Artificial Sequence
  Synthetic
AMHHYDVLTGYLDY

SEQ ID NO: 11603 - protein, 108 aa, Artificial Sequence
  Synthetic
SYVLTQPPSVSVAPGKTARITCGGNDIGSKNVHWYQQKPGQAPVLVVFDDSDRPSGIPERFSGSNSGNAATLTISRVEAGDEADYYCQVWESSGDHWVFGGGTKLTVL

SEQ ID NO: 11604 - protein, 11 aa, Artificial Sequence
  Synthetic
QVWESSGDHWV

SEQ ID NO: 11605 - protein, 124 aa, Artificial Sequence
  Synthetic
QVQLVESGGGVVQPGRSLRVSCAASGFTFSSYAMYWVRQAPGKGLEWVAVISYDGSNKYYADSVKGRFTISRDNSKNTLYLQMNSLRAEDTAVYYCARGSLGYCTNGVCYPEYWGQGTLVTVSS

SEQ ID NO: 11606 - protein, 17 aa, Artificial Sequence
  Synthetic
ARGSLGYCTNGVCYPEY

SEQ ID NO: 11607 - protein, 113 aa, Artificial Sequence
  Synthetic
NFMLTQPHSVSESPGKTVTISCTGSSGSIASNYVQWYQQRPGSAPTTVIYEDNQRPSGVPDRFSGSIDSSSNSASLTISGLKTEDEADYYCQSYDGINPVHWVFGGGTKLTVL

SEQ ID NO: 11608 - protein, 12 aa, Artificial Sequence
  Synthetic
QSYDGINPVHWV

SEQ ID NO: 11609 - protein, 121 aa, Artificial Sequence
  Synthetic
QVQLVQSGAEVKKPGASVKVSCKASGYTFTSHYMNWVRQAPGQGLEWMGIINPSTGSASYAQKLQGRLTMTRDTSTSTVYMKLSSLRSEDTAVYYCARANDILTGDYMDVWGKGTTVTVSS

SEQ ID NO: 11610 - protein, 14 aa, Artificial Sequence
  Synthetic
ARANDILTGDYMDV

SEQ ID NO: 11611 - protein, 108 aa, Artificial Sequence
  Synthetic
SYVLTQPPSVSVAPGKTATITCGGNNIGSKSVHWYQQKPGQAPVLVIYYDSDRPSGIPERFSGSNSGNTATLTISRVEAGDEADYYCQVWDSSGDHWVFGGGTKLTVL

SEQ ID NO: 11612 - protein, 11 aa, Artificial Sequence
  Synthetic
QVWDSSGDHWV

SEQ ID NO: 11613 - protein, 121 aa, Artificial Sequence
  Synthetic
QVQLVESGGGVVQPGRSLRLSCAASGFTFSSYAMHWVRQAPGKGLEWVAAISSDGSNKFYADSVKGRVTISRDTSKNTLYLQMNSLRAEDTAVYYCARESDILVVWAFDYWGQGTLVTVSS

SEQ ID NO: 11614 - protein, 14 aa, Artificial Sequence
  Synthetic
ARESDILVVWAFDY

SEQ ID NO: 11615 - protein, 108 aa, Artificial Sequence
  Synthetic
DIQMTQSPSSLSASVGDRVTITCRASQSISSYLNWYQQKPGKAPKLLIYAASSLQSGVPSRFSGSGSGTDFTLTISSLQPEDFATYYCQQSYSTPPGTFGQGTKLEIK

SEQ ID NO: 11616 - protein, 10 aa, Artificial Sequence
  Synthetic
QQSYSTPPGT

SEQ ID NO: 11617 - protein, 123 aa, Artificial Sequence
  Synthetic
EVQLVQSGAEVKKPGESLRISCKGSGYNFTTYWITWVRQMPGKGLEWMGRIDPSDSYTNYGPSFQGHVTISADKSISTAYLHWSSLKASDTAMYYCARQGSGSHYYYYYMDVWGKGTTVTVSS

SEQ ID NO: 11618 - protein, 16 aa, Artificial Sequence
  Synthetic
ARQGSGSHYYYYYMDV

SEQ ID NO: 11619 - protein, 107 aa, Artificial Sequence
  Synthetic
EIVMTQSPATLSVSPGERATLSCRASQSVSSNLAWYQQKPGQAPRLLIYGASTRAAGIPARFSGSGSGSEFTLTISSLQSEDFAIYYCQQYNSWLLTFGGGTKVEIK

SEQ ID NO: 11620 - protein, 9 aa, Artificial Sequence
  Synthetic
QQYNSWLLT

SEQ ID NO: 11621 - protein, 119 aa, Artificial Sequence
  Synthetic
QVQLVESGGGVVQPGRSLRLSCAASGFTFSDFGMHWVRQAPGKGLDWVAVVSHDGSNKNYADSVKGRFTISRDNSKNTLYLQMNSLRAEDTAVYYCASGTTYYTGIDYWGQGTLVTVSS

SEQ ID NO: 11622 - protein, 12 aa, Artificial Sequence
  Synthetic
ASGTTYYTGIDY

SEQ ID NO: 11623 - protein, 113 aa, Artificial Sequence
  Synthetic
NFMLTQPHSVSESPGKTVTISCTGSSGSIASNYVQWYQQRPGSAPTTVIYEDNQRPSGVPDRFSGSIDSSSNSASLTISGLKTEDEADYYCQSYDSSNRIFWVFGGGTKLTVL

SEQ ID NO: 11624 - protein, 12 aa, Artificial Sequence
  Synthetic
QSYDSSNRIFWV

SEQ ID NO: 11625 - protein, 120 aa, Artificial Sequence
  Synthetic
EVQLVESGGGLVQPGGSLRLSCVASGFTFSSYWMSWVRQAPGKGLEWVANIKEDGSEKYYVDSVKGRITISRDNAKNSLYLQMNSLRAEDTAIYYCARDLWEPRGRFDPWGQGTLVTVSS

SEQ ID NO: 11626 - protein, 13 aa, Artificial Sequence
  Synthetic
ARDLWEPRGRFDP

SEQ ID NO: 11627 - protein, 113 aa, Artificial Sequence
  Synthetic
QSVLTQPPSSSASPGESARLTCTLPSDINVRDYNMYWYQQKPGSPPRYLLYYYSDSDKDQGSGVPSRFSASKDASANTGILLISGLQSEDEADYHCMIWPSNAFGGGTKLTVL

SEQ ID NO: 11628 - protein, 7 aa, Artificial Sequence
  Synthetic
MIWPSNA

SEQ ID NO: 11629 - protein, 124 aa, Artificial Sequence
  Synthetic
QLQLQESGPGLVKPSETLSLTCTVSSGSISRSSYYWGWIRQPPGKGLEWIGSIYYSGSTYYNPSLKSRVTISVDTSKNQFSLKLSSVTAADTAMYYCARAPSLFGVVRSYIDYWGQGTLVTVSS

SEQ ID NO: 11630 - protein, 16 aa, Artificial Sequence
  Synthetic
ARAPSLFGVVRSYIDY

SEQ ID NO: 11631 - protein, 112 aa, Artificial Sequence
  Synthetic
  misc_feature (4)..(4): Xaa can be any naturally occurring amino acid
QFVXTQPPSVFGAPGQRVTISCTGSSSNIGAGYDVHWYQQLPGTAPKLLIYGNNNRPSGVPDRFFGSKFGTSASLAITGLQAEDEGDYYCQSYDSSLSGYVVFGGGTKLTVL

SEQ ID NO: 11632 - protein, 12 aa, Artificial Sequence
  Synthetic
QSYDSSLSGYVV

SEQ ID NO: 11633 - protein, 118 aa, Artificial Sequence
  Synthetic
EVQLVESGGGLIQPGGSLRLSCAASGIIVSSNYMSWVRQAPGKGLEWVSVIYSGGSKYYADSVKGRFTISRDNSKNTLYLQMNSLRAEDTAVYYCARDLEVAGGLDIWGQGTMVTVSS

SEQ ID NO: 11634 - protein, 12 aa, Artificial Sequence
  Synthetic
ARDLEVAGGLDI

SEQ ID NO: 11635 - protein, 106 aa, Artificial Sequence
  Synthetic
DIQLTQSPSFLSASVGDRVTITCRASQGISSYLAWYQKKPGKAPKVLIYAASTLQSGVPSRFSGSGSGTEFTLTISSLQPVDFATYYCQQLDSNRAFGPGTKVDIK

SEQ ID NO: 11636 - protein, 8 aa, Artificial Sequence
  Synthetic
QQLDSNRA

SEQ ID NO: 11637 - protein, 119 aa, Artificial Sequence
  Synthetic
EVQLVQSGAEVKKPGESLKISCKGSGYTFTTYWIGWVRQMPGKGLEWMGIIYPDDSDTRYSPSFQGQVSFSADKSISTAYLQWSSLQASDTAMYYCAIGIVVAPAANYWGQGTLVTVSS

SEQ ID NO: 11638 - protein, 12 aa, Artificial Sequence
  Synthetic
AIGIVVAPAANY

SEQ ID NO: 11639 - protein, 107 aa, Artificial Sequence
  Synthetic
DIQMTQSPSSLSASVGDRVTITCQASQDINYYLNWYQQKPGKAPKLLIYDASDLETGVPSRFSGSGSGTDFTFTISSLQPEDIATYYCQQYNDLPITFGQGTRLEIK

SEQ ID NO: 11640 - protein, 9 aa, Artificial Sequence
  Synthetic
QQYNDLPIT

SEQ ID NO: 11641 - protein, 119 aa, Artificial Sequence
  Synthetic
QVQLVQSGAEVKKPGASVKVSCKASGYTFTSYGISWVRQAPGQGLEWMGWISPYNGNTKYAQNFQGRVTMTTDTSTSTAYMELRSLRSDDAAVYYCARDGELLGWFDPWGQGTLVSVSS

SEQ ID NO: 11642 - protein, 12 aa, Artificial Sequence
  Synthetic
ARDGELLGWFDP

SEQ ID NO: 11643 - protein, 110 aa, Artificial Sequence
  Synthetic
QSVLTQPASVSGSPGQSITISCTGTSSDVGSYNLVSWYQQHPGKAPKLMIYEGSKRPSGVSNRFSGSKSGNTASLTISGLQAEDEANYYCCSYAGSSTWVFGGGTKLTVL

SEQ ID NO: 11644 - protein, 10 aa, Artificial Sequence
  Synthetic
CSYAGSSTWV

SEQ ID NO: 11645 - protein, 122 aa, Artificial Sequence
  Synthetic
QLQLQESGPRLVKPSETLSLTCTVSSGSMSSSSYYWGWIRQPPGKGLEWIGNIYYSGSTYYNPSLKSRVTISVATSKNQFSLQLSSVTAADTAVYYCARAQGIFGVVRIDYWAQGTLVTVSS

SEQ ID NO: 11646 - protein, 14 aa, Artificial Sequence
  Synthetic
ARAQGIFGVVRIDY

SEQ ID NO: 11647 - protein, 107 aa, Artificial Sequence
  Synthetic
  misc_feature (9)..(10): Xaa can be any naturally occurring amino acid
DIQMTQSPXXLSASVGDRVTITCRASQSISNYLNWYQQKPGKAPKVLIYAASNLQSGVPSRFSGSGSGTDFTLTVSSLQPEDFASYYCQQSYDTPWTFGQGTKVEIK

SEQ ID NO: 11648 - protein, 9 aa, Artificial Sequence
  Synthetic
QQSYDTPWT

SEQ ID NO: 11649 - protein, 126 aa, Artificial Sequence
  Synthetic
EVQLVQSGAEVKKPGESLKISCKGSGYSFTRYWIGWVRQMPGKGLEWMGIIYPGDSETRYSPSFQGQVTISADKSISTGYLQWSSLKASDTAMYYCASSTLGYCSSGSCFDVFDIWGQGTMVTVSS

SEQ ID NO: 11650 - protein, 19 aa, Artificial Sequence
  Synthetic
ASSTLGYCSSGSCFDVFDI

SEQ ID NO: 11651 - protein, 107 aa, Artificial Sequence
  Synthetic
EIVLTQSPATLSLSPGKRATLSCRASQSVSTYLAWYQQKPGQAPRLLIYDASNRATGIPARFSGSGSGTDFTLTISSLEPEDFAVYYCQQRSIWPWTFGQGTKVEIK

SEQ ID NO: 11652 - protein, 9 aa, Artificial Sequence
  Synthetic
QQRSIWPWT

SEQ ID NO: 11653 - protein, 118 aa, Artificial Sequence
  Synthetic
QVQLVQSGAEVKRPGSSVKVSCKASGGTFSSYAISWVRQAPGQGLEWMGGIIPIFGRTNYAQKFQGRVTITADESRSTAYMELSRLRYEDTAVYFCAVWGSYRSGDFWGQGTLVTVSS

SEQ ID NO: 11654 - protein, 11 aa, Artificial Sequence
  Synthetic
AVWGSYRSGDF

SEQ ID NO: 11655 - protein, 106 aa, Artificial Sequence
  Synthetic
EIVLTQSPGTLSLSPGDRATLSCRAGQSISSSYLAWYQQRPGQAPRLLIYDISTRATGIPDRFSGSGSGTDFTLTISRLEPEDFAVYYCQQYGTYRTFGQGTKVEI

SEQ ID NO: 11656 - protein, 8 aa, Artificial Sequence
  Synthetic
QQYGTYRT

SEQ ID NO: 11657 - protein, 123 aa, Artificial Sequence
  Synthetic
QMQLVQSGPEVKKPGTSVKVSCKASEFTFTSSAVQWVRQARGQRLEWIGWIVVGSGNTHYAQRFQERVTITRDMSTSIAYMELSSLRSEDTAVYYCAAPHCNRTTCYDGFDLWGQGTMVSVSS

SEQ ID NO: 11658 - protein, 16 aa, Artificial Sequence
  Synthetic
AAPHCNRTTCYDGFDL

SEQ ID NO: 11659 - protein, 109 aa, Artificial Sequence
  Synthetic
EIVLTQSPGTLSLSPGERATLSCRASQSVSSSYLAWYQQKPGQAPRLLIYGASSRATGIPDRFSGSGSGTDFTLTISRLEPEDFALYYCQQYVTSAGWTFGQGTKVEIK

SEQ ID NO: 11660 - protein, 10 aa, Artificial Sequence
  Synthetic
QQYVTSAGWT

SEQ ID NO: 11661 - protein, 120 aa, Artificial Sequence
  Synthetic
QVQLVQSGAEVKKPGASVKVSCKASGYTFTSYYMHWVRQAPGQGLEWMGIINPSGGSTSYAQKFQGRVTMTRDTSTSTVYMELSSLRSEDTAVYYCARADSGSYQHFDYWGQGTLVTVSS

SEQ ID NO: 11662 - protein, 13 aa, Artificial Sequence
  Synthetic
ARADSGSYQHFDY

SEQ ID NO: 11663 - protein, 108 aa, Artificial Sequence
  Synthetic
DIQMTQSPSSLSASVGDRVTITCRASQSISSYLNWYQQKPGKAPKLLIYAAFSLQSGVPSRFSGSGSGTDFTLTISSLQPEDFATYYCQQSYSTPLFTFGPGTKVDIK

SEQ ID NO: 11664 - protein, 10 aa, Artificial Sequence
  Synthetic
QQSYSTPLFT

SEQ ID NO: 11665 - protein, 126 aa, Artificial Sequence
  Synthetic
QVQLVQSGAEVKKPGSSVKVSCKASGGTFSSYALTWVRQAPGQGLEWMGGIIPMFGTANYAQKFQGRVTITADKSTNTVYMELSSLRSEDTAVYYCARDPDYVWSNNRFFGAFDIWGQGTLVTVSS

SEQ ID NO: 11666 - protein, 19 aa, Artificial Sequence
  Synthetic
ARDPDYVWSNNRFFGAFDI

SEQ ID NO: 11667 - protein, 110 aa, Artificial Sequence
  Synthetic
QSVLTQPPSVSAAPGQKVTISCSGSSSNIEDNYVSWYRQLPGTAPKLLIYESNKRPSGIPDRFSGSKSGTSATLGITGLQTGDEADYYCGTWDSSLSAWVFGGGTKLTVL

SEQ ID NO: 11668 - protein, 11 aa, Artificial Sequence
  Synthetic
GTWDSSLSAWV

SEQ ID NO: 11669 - protein, 123 aa, Artificial Sequence
  Synthetic
QMQLVQSGPEVKKPGTSVKVSCKASGFTFSSSAIQWVRQARGQRLEWIGWIVVGSGNTNYAQKFQERVTITRDMSTSTAYMELSSLRSEDTAVYYCAAPSCSGVTCYDGFDLWGQGTMVTVSS

SEQ ID NO: 11670 - protein, 16 aa, Artificial Sequence
  Synthetic
AAPSCSGVTCYDGFDL

SEQ ID NO: 11671 - protein, 112 aa, Artificial Sequence
  Synthetic
DIVMTQTPLSLPVIPGEPPSISCRSSQSLLDSDDGNTYLDWSLQKPGQSPQLLIYTLSQRASGVPDRCRGCGSGTDFTLKISRVEAEDVGVYYCMQRVEFLFFGGGTKVEIK

SEQ ID NO: 11672 - protein, 8 aa, Artificial Sequence
  Synthetic
MQRVEFLF

SEQ ID NO: 11673 - protein, 125 aa, Artificial Sequence
  Synthetic
QLQLQESGPGLVKPSETLSLTCTVSGGSISSSSYYWDWIRQPPGKGLEWIGNIYYSGITYYNPSLKSRVTISVDTSKNEFSLKLSSVTAADTAVYYCARFSRYCSSTSCYNFDHWGQGTLVTVSS

SEQ ID NO: 11674 - protein, 17 aa, Artificial Sequence
  Synthetic
ARFSRYCSSTSCYNFDH

SEQ ID NO: 11675 - protein, 111 aa, Artificial Sequence
  Synthetic
QSVLTQPRSVSGSPGQSVTISCTGTSSDVGGYDYVSWYQQHPGKAPKLMIYDVTKRPSGVPHRFSGSKSGNTASLTISGLQAEDEADYYCCSYTGRYTGSLFGTGTKVTVL

SEQ ID NO: 11676 - protein, 11 aa, Artificial Sequence
  Synthetic
CSYTGRYTGSL

SEQ ID NO: 11677 - protein, 117 aa, Artificial Sequence
  Synthetic
EVQLVESGGGLVQPGGSLRLSCAASGFTVSSNYMIWVRQAPGKGLEWVSVIYPGGSTFYADSVKGRFTISRDNSKNTLYLQINNLRAEDTAVYYCARAPYSRSGEIWGLGIMVTVSS

SEQ ID NO: 11678 - protein, 11 aa, Artificial Sequence
  Synthetic
ARAPYSRSGEI

SEQ ID NO: 11679 - protein, 107 aa, Artificial Sequence
  Synthetic
DIQMTQSPSSLSASVGDRVTITCQASQDIRNYLNWYQEKPGKAPKLLIYDASNLGTGVPSRFSGSGSGTDFTLTITSLQPEDIATYYCQQFDNLPITFGQGTRLEIK

SEQ ID NO: 11680 - protein, 9 aa, Artificial Sequence
  Synthetic
QQFDNLPIT

SEQ ID NO: 11681 - protein, 129 aa, Artificial Sequence
  Synthetic
QVQLVESGGGVVQPGRSLRLSCAASGFIFSSYDMHWVRQAPGKGLEWVAVIWYDGSNKYYEDSVKGRFTIARDNSKNTLYLQMNSLRAEDTAVYYCARRPRGYYDRSGYYILEDYFEYWGQGTLVTVSS

SEQ ID NO: 11682 - protein, 22 aa, Artificial Sequence
  Synthetic
ARRPRGYYDRSGYYILEDYFEY

SEQ ID NO: 11683 - protein, 109 aa, Artificial Sequence
  Synthetic
EIVLTQSPGTLSLSPGERAALSCRASQSVSSSYLAWYQQKPGQAPRLLIYGASSRATGIPDRFSGSGSGTDFTLTISRLEPEDFAVYYCQQYGSSPRLTFGGGTKVEIK

SEQ ID NO: 11684 - protein, 10 aa, Artificial Sequence
  Synthetic
QQYGSSPRLT

SEQ ID NO: 11685 - protein, 124 aa, Artificial Sequence
  Synthetic
QVQLVESGGGVVQPGRSLRLSCAASGFIFRRYGMHWVRQAPGKGLECVAFISYDGSDKYYGVSVEGRFTISRDNSKNTLYLQMNSLRAEDTAVYYCAKGSMYSSSWYGGYFDFWGQGTLVTVSS

SEQ ID NO: 11686 - protein, 17 aa, Artificial Sequence
  Synthetic
AKGSMYSSSWYGGYFDF

SEQ ID NO: 11687 - protein, 107 aa, Artificial Sequence
  Synthetic
  misc_feature (9)..(9): Xaa can be any naturally occurring amino acid
DIQMTQSPXSLSASVGDRVTITCRASQSISSWLAWYQQKPGKAPKLLIYQASSLESGVPSRFSGSGSGTEFTLTISSLQPDDFATYYCQHYNSYPYTFGQGTKVEIK

SEQ ID NO: 11688 - protein, 9 aa, Artificial Sequence
  Synthetic
QHYNSYPYT

SEQ ID NO: 11689 - protein, 122 aa, Artificial Sequence; identical to SEQ ID NO: 11365
  Synthetic

SEQ ID NO: 11690 - protein, 16 aa, Artificial Sequence
  Synthetic
ARGGDYHSLYEGQFDY

SEQ ID NO: 11691 - protein, 111 aa, Artificial Sequence; identical to SEQ ID NO: 11367
  Synthetic

SEQ ID NO: 11692 - protein, 12 aa, Artificial Sequence
  Synthetic
GTWEGRLNTLYV

SEQ ID NO: 11693 - protein, 121 aa, Artificial Sequence
  Synthetic
EVQLVQSGAEVKKPGESLRIACKGSGYSFSNYWISWVRQMPGKGLEWMGRIDPSDSDTDYSPSFQGHVTISSDKSISTAYLQWSSLKASDSAIYYCAREAVVIAATHLDSWGQGTLVTVSS

SEQ ID NO: 11694 - protein, 14 aa, Artificial Sequence
  Synthetic
AREAVVIAATHLDS

SEQ ID NO: 11695 - protein, 109 aa, Artificial Sequence
  Synthetic
EIVLTQSPATLSLSPGERATLSCRASQSVSSYLDWYQQKPGQAPRLLIYDASNRATGIPARFSGSGSGTDFTLTISSLEPEDFAVYYCQQRSNWPPGYTFGQGTKLEIK

SEQ ID NO: 11696 - protein, 11 aa, Artificial Sequence
  Synthetic
QQRSNWPPGYT

SEQ ID NO: 11697 - protein, 121 aa, Artificial Sequence
  Synthetic
QVQLVQSGAEVKKPGSSVKVSCKASGGTFSSYAISWVRQAPGQGLEWMGGIIPIFGTTNYAPRFQGRVTLTADESTSTAYMELSGLRSEDTAVYYCARWGDILTGLGFDYWGQGTLVTVSS

SEQ ID NO: 11698 - protein, 14 aa, Artificial Sequence
  Synthetic
ARWGDILTGLGFDY

SEQ ID NO: 11699 - protein, 107 aa, Artificial Sequence
  Synthetic
EIVLTQSPGTLSLSPGERATLSCRASQSVSSNYLAWYQQKPGQAPRLLIYDASSRATGIPDRFSGSGSGTDFTLTISRLEPEDFAVYYCQQYGRSRTFGQGTKVDVK

SEQ ID NO: 11700 - protein, 8 aa, Artificial Sequence
  Synthetic
QQYGRSRT

SEQ ID NO: 11701 - protein, 121 aa, Artificial Sequence
  Synthetic
EVQLVESGGGLVQPGGSLRLSCSASGFSFSDYAMHWVRQVPGKGLEYVSGISSNGGITDYADSVKGRFTISRDNSKNTLYVQMSSLRAEDTAVYYCVKDRVDTVILMLDYWGQGTLVTVSS

SEQ ID NO: 11702 - protein, 14 aa, Artificial Sequence
  Synthetic
VKDRVDTVILMLDY

SEQ ID NO: 11703 - protein, 107 aa, Artificial Sequence
  Synthetic
DIQMTQSPSSLSASVGDGVTITCRASQSINNYLNWYQQKLGKPPKLLISGASTLQSGVPSRFSGSGSGTDFTLTISSLQPGDFATYYCQQSYSTPPTFGQGTKVDIK

SEQ ID NO: 11704 - protein, 9 aa, Artificial Sequence
  Synthetic
QQSYSTPPT

SEQ ID NO: 11705 - protein, 119 aa, Artificial Sequence
  Synthetic
QVQLVQSGAEVKKPGASVKVSCKASGYTLTSYYMHWVRQAPGQGLECMGVINPSGGGTTYAQKFQGRVTMTRDTSRSTVYMELSSLRSEDTAVYYCASSQWLRGYFEYWGQGTLVTVSS

SEQ ID NO: 11706 - protein, 12 aa, Artificial Sequence
  Synthetic
ASSQWLRGYFEY

SEQ ID NO: 11707 - protein, 110 aa, Artificial Sequence
  Synthetic
NFMLTQPHSVSESPGKTVTISCTGSSGSIANNYVQWYQQRPGSAPTTVIYEDNQRPSGVPDRFSGSIDSSSNSASLTISGLKTEDEADYYCQSYDSSSWVFGGGTKLTVL

SEQ ID NO: 11708 - protein, 9 aa, Artificial Sequence
  Synthetic
QSYDSSSWV

SEQ ID NO: 11709 - protein, 120 aa, Artificial Sequence
  Synthetic
EVQLVESGGGLVQPGGSLRLSCAASGFTFRSYAMSWVRQAPGKGLEWVSGISGSGGGTNYADSVKGRFTISRDNSKNTLYLQMNSLRAEDTAIYYCAKLVTAAASGPDYWGQGTLVTVSS

SEQ ID NO: 11710 - protein, 13 aa, Artificial Sequence
  Synthetic
AKLVTAAASGPDY

SEQ ID NO: 11711 - protein, 106 aa, Artificial Sequence
  Synthetic
DIQMTQSPSSLSASVGDRVTITCRASQGIRNDLGWYQQKPGKAPKRLIYAASNLQSGVPSRFSGSGSGTEFTLTISSLQPEDFATYYCLQHYSWWTFGQGTKVEIK

SEQ ID NO: 11712 - protein, 8 aa, Artificial Sequence
  Synthetic
LQHYSWWT

SEQ ID NO: 11713 - protein, 122 aa, Artificial Sequence
  Synthetic
QLQLQESGPGLVKPSETLSLTCAVSSGSISRSSYYWGWIRQPPGKGLEWIGSIYYSGSTYYNPSLKSRVTISVDMSKNYFSLKLSSVTAADTAVYYCAREAGLYSSSYFDSWGQGTLVTVSS

SEQ ID NO: 11714 - protein, 14 aa, Artificial Sequence
  Synthetic
AREAGLYSSSYFDS

SEQ ID NO: 11715 - protein, 107 aa, Artificial Sequence
  Synthetic
DIQMTQSPSSLSASVGDRVTITCRASQSISNYLNWYQQKPGKAPKLLIYAASSLQSGVPSRFSGSGSGTDFTLTISSLQPEDFATYYCQQRYSTLITFGQGTRLEIK

SEQ ID NO: 11716 - protein, 9 aa, Artificial Sequence
  Synthetic
QQRYSTLIT

SEQ ID NO: 11717 - protein, 122 aa, Artificial Sequence
  Synthetic
QVQLQESGPGLVKPSQTLSLTCSVSGDSISSGDYYWSWIRQPPGKGLEWIGYIYYSGSTYYNPSLKSRVSLSLDTSKNQFSLKLSSVTAADTAVYYCARARVMITLIWFDPWGQGTLVTVSS

SEQ ID NO: 11718 - protein, 14 aa, Artificial Sequence
  Synthetic
ARARVMITLIWFDP

SEQ ID NO: 11719 - protein, 110 aa, Artificial Sequence
  Synthetic
NFMLTQPHSVSESPGRTVTISCTGSSGSIASNYVQWYQQRPGSAPTTLIYEDNQRPSGVPDRFSASIDSSSNSASLTISGLKTEDEADYYCQSYASRNPVFGGGTKLTVL

SEQ ID NO: 11720 - protein, 9 aa, Artificial Sequence
  Synthetic
QSYASRNPV

SEQ ID NO: 11721 - protein, 118 aa, Artificial Sequence
  Synthetic
QVQLQESGPGLVKPSETLSLTCTVSGYSISSGYYWGWIRQPPGKGLEWIGSIYNSGSTYYNPSLKSRVTISVDTSQNQFSLKLSSVTAADTAVYYCARDPWGTGIDYWGQGTLVTVSS

SEQ ID NO: 11722 - protein, 11 aa, Artificial Sequence
  Synthetic
ARDPWGTGIDY

SEQ ID NO: 11723 - protein, 105 aa, Artificial Sequence
  Synthetic
EIVLTQSPGTLSLSPGERATLSCRASQTVSSSYLAWYQQKPGQAPRLLIYGASSRATGIPDRFSGSGSGTDFTLTISRLEPEDFAVYYCQQFGQTFGQGTKVEIK

SEQ ID NO: 11724 - protein, 6 aa, Artificial Sequence
  Synthetic
QQFGQT

SEQ ID NO: 11725 - protein, 129 aa, Artificial Sequence
  Synthetic
EVQLVESGGGLVQPGRSLRLSCTASGFTFGDYAMSWFRQAPGKGLEWVGLIKSKGYGGTTEYAASVKGRFTISRDDSKSIAYLQMNSLKTEDTAVYYCTRDRVEYWSGYYYSYYNMDVWGKGTTVTVSS

SEQ ID NO: 11726 - protein, 20 aa, Artificial Sequence
  Synthetic
TRDRVEYWSGYYYSYYNMDV

SEQ ID NO: 11727 - protein, 108 aa, Artificial Sequence
  Synthetic
EIVLTQSPATLSLSPGERATLSCRASQSVRSSLAWYQQKPGQAPRLLIYDASNRATGIPARFSGSGSGTDFTLTISSLEPEDFAVYYCQQRSNWPMYTFGQGTKLEIK

SEQ ID NO: 11728 - protein, 10 aa, Artificial Sequence
  Synthetic
QQRSNWPMYT

SEQ ID NO: 11729 - protein, 126 aa, Artificial Sequence
  Synthetic
QVQLVQSGAEVKKPGSSVKVSCKASGGTFSSYVISWVRQAPGQGLEWMGGIIPIFGSPVYSQKFQGRVTITADESTRTAYMNLISLRSEDTAVYYCARANVYCSGGSCYRNYFDYWGQGTLVTVSS

SEQ ID NO: 11730 - protein, 19 aa, Artificial Sequence
  Synthetic
ARANVYCSGGSCYRNYFDY

SEQ ID NO: 11731 - protein, 108 aa, Artificial Sequence
  Synthetic
EIVLTQSPGTLSLSPGERATLSCRASESISNIYLAWYQQKPGQAPRLLIYGASSRATGIPDRFSGSGSGTDFTLTISRLEPEDFAVYYCQQYGSSPQTFGQGTKVEIK

SEQ ID NO: 11732 - protein, 9 aa, Artificial Sequence
  Synthetic
QQYGSSPQT

SEQ ID NO: 11733 - protein, 119 aa, Artificial Sequence
  Synthetic
QVQLVESGGGLVKPGGSLRLSCAASGFTFSDYFMTWVRQAPGKGLEWVSYISTTSSFTNYADSVKGRFTISRDNAKNSLYLQMNSLRAEDTAVYYCARDRGVLDRFDYWGQGALVTVSS

SEQ ID NO: 11734 - protein, 12 aa, Artificial Sequence
  Synthetic
ARDRGVLDRFDY

SEQ ID NO: 11735 - protein, 107 aa, Artificial Sequence
  Synthetic
DIQMTQSPSSLSASVGDRVTITCQASQDISNYLNWYQQKPGKAPKLLIYDASNLETGVPSRFSGSRSGTDFTFTISSLQPEDIATFYCQQYDNLPLTFGGGTKVEIK

SEQ ID NO: 11736 - protein, 9 aa, Artificial Sequence
  Synthetic
QQYDNLPLT

SEQ ID NO: 11737 - protein, 119 aa, Artificial Sequence
  Synthetic
EVQLVQSGAEVKKPGESLKISCKGSGYSFTSQWIGWVRQKPGKGLDWMGIIFPGDSDTRYSPSFQGQVTISADKSISTAYLQWSSLKASDTAVYYCARTPTLHNWFDLWGQGTLVTVTS

SEQ ID NO: 11738 - protein, 12 aa, Artificial Sequence
  Synthetic
ARTPTLHNWFDL

SEQ ID NO: 11739 - protein, 110 aa, Artificial Sequence
  Synthetic
QSVLTQPPSASGTPGQRVTISCSGSSSNIGSNPVNWYQQLPGTAPKLLIYNNNQRPSGVPDRFSGSKSGTSASLAISGLQSEDEADYYCAAWDDSLNGWVFGGGTKLTVL

SEQ ID NO: 11740 - protein, 11 aa, Artificial Sequence
  Synthetic
AAWDDSLNGWV

SEQ ID NO: 11741 - protein, 124 aa, Artificial Sequence
  Synthetic
QVQLQESGPGLVKPSQTLSLTCTVSGGSISSGDYYWSWIRQPPGKGLEWIGYIYYSGITYYNPSLKSRVTISVDTSKNQFSLKLSSVTAADTAVYYCARVSRTYGSGGYSFDYWGQGTLVTVSS

SEQ ID NO: 11742 - protein, 16 aa, Artificial Sequence
  Synthetic
ARVSRTYGSGGYSFDY

SEQ ID NO: 11743 - protein, 111 aa, Artificial Sequence
  Synthetic
QSVLTQPASVSGSPGQSITISCTGTSSDVGSYDLVSWYQQHPGKAPKLMIYEGSKRPSGVSNRFSGSKSGNTASLTISGLQAEDEADYYCCSYVGSSSFYVFGTGTNVTVL

SEQ ID NO: 11744 - protein, 11 aa, Artificial Sequence
  Synthetic
CSYVGSSSFYV

SEQ ID NO: 11745 - protein, 127 aa, Artificial Sequence
  Synthetic
QVQLVESGGGVVQPGRSLRLSCAASGFSFSSYVMHWVRQAPGKGLEWVAVILYDGNNKYYADSVKGRFTISRDNSKNTLYLQMNSLRAEDTAVYYCAKRGGMYCSGGSCYGGYFDYWGQGTLVTVSS

SEQ ID NO: 11746 - protein, 20 aa, Artificial Sequence
  Synthetic
AKRGGMYCSGGSCYGGYFDY

SEQ ID NO: 11747 - protein, 106 aa, Artificial Sequence
  Synthetic
DIQMTQSPSSLSASVGDRVTITCQASQDISNYLNWYQQKPGKAPKLLIYDASNLETGVPSKFSGSGSGTDFTFTISGLQPEDIATYYCQQYDNLLTFGGGTKVEIK

SEQ ID NO: 11748 - protein, 8 aa, Artificial Sequence
  Synthetic
QQYDNLLT

SEQ ID NO: 11749 - protein, 122 aa, Artificial Sequence
  Synthetic
QVQLQESGPGLVKPSETLSLTCTVSGGSISSYYWSWIRQPPGKGLEWIAYMYFSGNTYYNSSLKSRVTISVDTSKNQFSLRLNSVTAADTAVYYCARGFAVPAATYNWFDPWGQGTLVTVSS

SEQ ID NO: 11750 - protein, 16 aa, Artificial Sequence
  Synthetic
ARGFAVPAATYNWFDP

SEQ ID NO: 11751 - protein, 106 aa, Artificial Sequence
  Synthetic
SYVLTQPLSVSVALGQTARITCGGNNIGSKNVHWYQQKPGQAPVLVIYRDSNRPSGIPERFSGSNSGNTATLTISRAQAGDEADYYCQVWDSSTVVFGGGTQLTVL

SEQ ID NO: 11752 - protein, 9 aa, Artificial Sequence
  Synthetic
QVWDSSTVV

SEQ ID NO: 11753 - protein, 133 aa, Artificial Sequence
  Synthetic
QLQLQESGPGLVKPSETLSLTCTVSGGSISSSSYYWGWVRQPPEKGLEWIGSIFYSGSTYYNPSLKSRVTISVDTSKNQFSLKLSSVTAADTAVYYCAIQSRDGSNYRFGGRGGIYYYYMDVWGKGTTVTVSS

SEQ ID NO: 11754 - protein, 25 aa, Artificial Sequence
  Synthetic
AIQSRDGSNYRFGGRGGIYYYYMDV

SEQ ID NO: 11755 - protein, 113 aa, Artificial Sequence
  Synthetic
QSVLTQPPSVSGAPGQRVTISCTGSSSNIGAGYDVHWYQQLPGTAPKLLIYGNTNRPSGVPDRFSGSKSGTSASLAITGLQAEDEADYYCQSYDSSLSDWDVIFGGGTKLTVL

SEQ ID NO: 11756 - protein, 13 aa, Artificial Sequence
  Synthetic
QSYDSSLSDWDVI

SEQ ID NO: 11757 - protein, 118 aa, Artificial Sequence
  Synthetic
QVQLVQSGAEVRKPGSSVKVSCKASGGTFTSYSVSWVRQAPGQGLEWMGAIIPKFDTANYAQKFQGRLTITADKSTSTAYMELSSLRSEDTAMYYCTSILTGYYFDYWGQGTLVTVSS

SEQ ID NO: 11758 - protein, 11 aa, Artificial Sequence
  Synthetic
TSILTGYYFDY

SEQ ID NO: 11759 - protein, 106 aa, Artificial Sequence
  Synthetic
EIVLTQSPATLSLSPGERATLSCRASQSVGSYLAWYQQKPGQAPRLLIYDASNRATGIPARFNGSGSGTDFTLTISSLEPEDFAVYYCQQRFNWPTFGGGTKVEIK

SEQ ID NO: 11760 - protein, 8 aa, Artificial Sequence
  Synthetic
QQRFNWPT

SEQ ID NO: 11761 - protein, 121 aa, Artificial Sequence
  Synthetic
EVQLVQSGAQVKKPGESLKISCKGSGYSFTIYWIGWVRQMPGKGLEWMGIVYPGDSNIIYSPSFQGQVTISADKSISTAHLQWSSLKASDTAIYFCASSQGGRYSGYTMYWGQGTRLTVSS

SEQ ID NO: 11762 - protein, 14 aa, Artificial Sequence
  Synthetic
ASSQGGRYSGYTMY

SEQ ID NO: 11763 - protein, 112 aa, Artificial Sequence
  Synthetic
  misc_feature (14)..(14): Xaa can be any naturally occurring amino acid
DIVMTQSPLSLPVXPGEPASISCRSSQSLLHSNGYNYLDWYLQKPGQSPQLLIYFGSNRASGVPDRFSGTVLGTDFTLKISRVEAEDVGVYYCMQALQTPPTFGQGTKVEIK

SEQ ID NO: 11764 - protein, 9 aa, Artificial Sequence
  Synthetic
MQALQTPPT

SEQ ID NO: 11765 - protein, 118 aa, Artificial Sequence
  Synthetic
QVQLQESGPGLVKPSGTLSLTCTVSGGSINIYYWRWIRQAPGKGLEWIGYMYDSGRTNYNPSLKSRVTISVDTSKNQFSLKLSSVTAADTALYYCARTEWLRGHIDYWGQGALVTVSS

SEQ ID NO: 11766 - protein, 12 aa, Artificial Sequence
  Synthetic
ARTEWLRGHIDY

SEQ ID NO: 11767 - protein, 111 aa, Artificial Sequence
  Synthetic
NFMLTQPHSVSESPGKTVTISCTASSGSIVNNYVHWYQQRPGSAPTTVIYEDNQRPSGVPDRFSGSIDSSSNSASLTISGLKTEDEADYYCQSFDSSVNWVFGGGTKLTVL

SEQ ID NO: 11768 - protein, 10 aa, Artificial Sequence
  Synthetic
QSFDSSVNWV

SEQ ID NO: 11769 - protein, 119 aa, Artificial Sequence
  Synthetic
QVQLQESGPGLVKPSQTLSLTCSVSGGSISSYGYYWSWIRQHPGRGLEWLAYIYYSGTTHSSPSLKSRVTLSVDTSKNQFSLKLTSVTAADTAVYYCARFSAAGHFDYWGQGILVTVSS

SEQ ID NO: 11770 - protein, 11 aa, Artificial Sequence
  Synthetic
ARFSAAGHFDY

SEQ ID NO: 11771 - protein, 108 aa, Artificial Sequence
  Synthetic
DIQMTQSPSSLSASLGDRVTITCQASQDISNYLNWYQQKPGKAPKLLIYDASNLETGVPSRFSGSGSGTDFTFTISSLQPEDIGTYYCQEYENLVGLTFGGGTKVEIK

SEQ ID NO: 11772 - protein, 10 aa, Artificial Sequence
  Synthetic
QEYENLVGLT

SEQ ID NO: 11773 - protein, 121 aa, Artificial Sequence
  Synthetic
EVQLLESGGGLVQPGGSLRLSCAASGFSFSVCDMSWVRQGPGKGLEWVSTIYRTGGSAFYADSVKGRFTISRDNFKNTMYLQLNSLRADDTAVYYCAKVFEYFGENTFDYWGPGTVVSVSS

SEQ ID NO: 11774 - protein, 14 aa, Artificial Sequence
  Synthetic
AKVFEYFGENTFDY

SEQ ID NO: 11775 - protein, 108 aa, Artificial Sequence
  Synthetic
DIQLTQSPSFLSASVGDRVTITCRASPGISNFLAWYQQKPGKAPKLLIYAASTLHSGVPSRFSGSGSGTEFTLTISSLQPEDFATYYCQQLNSYPPLTFGGGTKVEIK

SEQ ID NO: 11776 - protein, 10 aa, Artificial Sequence
  Synthetic
QQLNSYPPLT

SEQ ID NO: 11777 - protein, 120 aa, Artificial Sequence
  Synthetic
QVQLVESGGGVVQPGRSLRLSCAVSGFTFSSFDMHWVRQAPGKGLEWVAVISDDGSSKFYADSVRGRFTISRDNSKNTLYLQMNSLRTEDTAVYYCVKDGAMIVYYFDYWGQGTLVTVSS

SEQ ID NO: 11778 - protein, 13 aa, Artificial Sequence
  Synthetic
VKDGAMIVYYFDY

SEQ ID NO: 11779 - protein, 108 aa, Artificial Sequence
  Synthetic
DIQMTQSPSSLAASAGDRVTITCRASQSINNYLNWYQQKPGKAPKLLIYATSSLQSGVPSRFSGSGSGTDFTLTISSLQPEDCATYYCQQSYSTLALTFGGGTKVEIK

SEQ ID NO: 11780 - protein, 10 aa, Artificial Sequence
  Synthetic
QQSYSTLALT

SEQ ID NO: 11781 - protein, 116 aa, Artificial Sequence
  Synthetic
QMQLVQSGPEVKKPGTSVKVSCKDSGFSFSSSAVQWVRQARGQRPEWIGWIVVGTGHTNYAQKFQERVTITRDMSTRTAYMELTSLRAEDTAVYYCAAGWQQLESWGQGTLVTVSS

SEQ ID NO: 11782 - protein, 9 aa, Artificial Sequence
  Synthetic
AAGWQQLES

SEQ ID NO: 11783 - protein, 113 aa, Artificial Sequence
  Synthetic
DIVMTQSPDSLAVSLGERATINCKSSQTLLYSSNNKNYLAWYQQKPGQPPKLLIYWASTRESGVPDRFSGSGSGTDFTLTISSLQAEDVAVYYCHHYYSAPPTFGQGTRLEIK

SEQ ID NO: 11784 - protein, 9 aa, Artificial Sequence
  Synthetic
HHYYSAPPT

SEQ ID NO: 11785 - protein, 120 aa, Artificial Sequence
  Synthetic
QVQLVESGGGVVQPGRSLRLSCAASGFTFGSYAMHWVRQTPGKGLEWVAVILDDGKNKLYADSVKGRFSISRDNSKNTLYLQLNSLRAEDTALYYCARDQGTMTTFFDYWGQGALVTVSS

SEQ ID NO: 11786 - protein, 13 aa, Artificial Sequence
  Synthetic
ARDQGTMTTFFDY

SEQ ID NO: 11787 - protein, 108 aa, Artificial Sequence
  Synthetic
DIQMTQSPSSLSASVGDRVTITCRASQSISKDLNWYQQKPGKAPKLLIYDTSSLQSGVPSRFSGSGSGTDFTLTISSLQPEDFATYYCQQSYSTPPWTFGQGTKVEIK

SEQ ID NO: 11788 - protein, 10 aa, Artificial Sequence
  Synthetic
QQSYSTPPWT

SEQ ID NO: 11789 - protein, 124 aa, Artificial Sequence
  Synthetic
QVQLVESGGGVVQPGRSLRLSCAASGFIFSRYGMHWVRQAPGKGLEWAAVIWYDGSNKYYGDSVKGRFTISRDNSKNTVYLEMNSLRVEDTAVYYCARDGEEVDITGGYQFDRWGQGTLVTVSS

SEQ ID NO: 11790 - protein, 17 aa, Artificial Sequence
  Synthetic
ARDGEEVDITGGYQFDR

SEQ ID NO: 11791 - protein, 110 aa, Artificial Sequence
  Synthetic
QSVLTQPASVSGSPGQSITISCTGTSSDVGGYNYVSWYQQHPGKAPKLVIYGVSNRPSGISNRFSGSKSGNTASLTISGLQAEDEADYYCGSYTARSTGVFGGGTKLTVL

SEQ ID NO: 11792 - protein, 10 aa, Artificial Sequence
  Synthetic
GSYTARSTGV

SEQ ID NO: 11793 - protein, 116 aa, Artificial Sequence
  Synthetic
EVQLVESGGGLVQPGGSLRLSCAASGIIVSSNYMSWVRQAPGKGLEWVSVIYPGGSTFYADSVRGRFTISRDKSKNTLHLQMNSLRAEDTALYYCARDRGGDLFDYWGQGTLVTVS

SEQ ID NO: 11794 - protein, 11 aa, Artificial Sequence
  Synthetic
ARDRGGDLFDY

SEQ ID NO: 11795 - protein, 108 aa, Artificial Sequence
  Synthetic
DIQLTQSPSFLSASVGDRVTITCRASQGISSYLAWYQQKPGKAPKLLIYGASTLQSGVPSRFSGSGSGTEFTLTISSLQPEDFATYYCQQLNGQPPITFGQGTKLEIK

SEQ ID NO: 11796 - protein, 10 aa, Artificial Sequence
  Synthetic
QQLNGQPPIT

SEQ ID NO: 11797 - protein, 122 aa, Artificial Sequence
  Synthetic
QVQLVQSGAEVKKPGSSVKVSCKASGGTFSSFAISWVRQAPGQGLEWMGGIIPLLGRPNYAQKFQGRVTITADESTSTAYMELRSLTSEDTAVYYCARWGNQFDSSGTLDYWGQGTLVTVSS

SEQ ID NO: 11798 - protein, 15 aa, Artificial Sequence
  Synthetic
ARWGNQFDSSGTLDY

SEQ ID NO: 11799 - protein, 107 aa, Artificial Sequence
  Synthetic
EIVLTQSPGTLSLSPGERATLSCRASQSVRSNYLAWYQQKPGQAPRLLIYGVSSRATGIPDRFSGSGSGTDFTLTISRLEPEDFAVYYCHHYGNSRGFGQGTKLEIK

SEQ ID NO: 11800 - protein, 8 aa, Artificial Sequence
  Synthetic
HHYGNSRG

SEQ ID NO: 11801 - protein, 121 aa, Artificial Sequence
  Synthetic
QVQLVESGGGVVHPGRSLKLSCVASGFPFITYSVHWVRQAPGKGLEWLAFISYDGTNKSYAESVKGRFTISRDNFENTLSLQMNSLRPEDTAVYFCARDLRGIHRGYFDFWGRGTLVTVSS

SEQ ID NO: 11802 - protein, 14 aa, Artificial Sequence
  Synthetic
ARDLRGIHRGYFDF

SEQ ID NO: 11803 - protein, 107 aa, Artificial Sequence
  Synthetic
DIQLTQSPSFLSASVGDRVIITCRASQGISRSLAWYQQKPGKAPNLLIYAASTVQGGAPTRFSGSGSGTEFTLTISSLQPEDFATYYCQQLNSFPLTFGPGTKVDIK

SEQ ID NO: 11804 - protein, 9 aa, Artificial Sequence
  Synthetic
QQLNSFPLT

SEQ ID NO: 11805 - protein, 121 aa, Artificial Sequence
  Synthetic
  misc_feature (9)..(9): Xaa can be any naturally occurring amino acid
EVQLVESGXGLVQPGGSLRLSCSASGFTFSSYPMHWVRQAPGKGLEYVSGISSNGGITDFADSVKGRFTISRDNSKNTLYLQMSSLRAEDTALYYCVKDRLDTIILMLDYWGQGTLVTVSS

SEQ ID NO: 11806 - protein, 14 aa, Artificial Sequence
  Synthetic
VKDRLDTIILMLDY

SEQ ID NO: 11807 - protein, 107 aa, Artificial Sequence
  Synthetic
DIQMTQSPSSLSASVGDRVTITCRASQNINNYLNWYQQKPGKAPKLLIFAASSLQSGVPSRFSGSGSGTDFTLIITSLQPEDFATYYCQQSYSTPPTFGQGTKVNIK

SEQ ID NO: 11808 - protein, 9 aa, Artificial Sequence
  Synthetic
QQSYSTPPT

SEQ ID NO: 11809 - protein, 118 aa, Artificial Sequence
  Synthetic
EVQLVESGGGLVQPGGSLRLSCAASGLTVSSNYMSWVRQTPGRGLEWVSIIYSGGSTFYADSVKGRFTISRDNSKNTLYLEMKSLRAEDTAVFYCARDLGPVGGSDSWGQGTLVTVSS

SEQ ID NO: 11810 - protein, 12 aa, Artificial Sequence
  Synthetic
ARDLGPVGGSDS

SEQ ID NO: 11811 - protein, 109 aa, Artificial Sequence
  Synthetic
  misc_feature (9)..(10): Xaa can be any naturally occurring amino acid
EIVMTQSPXXLYVSPGERATLSCRASQSVSSNLAWYQQKPGQAPRLLIYGASTRATGIPARFSGSGSGTEFTLTISSLQSEDFAVYYCQQYNNWPPMYTFGQGTKLEIK

SEQ ID NO: 11812 - protein, 11 aa, Artificial Sequence
  Synthetic
QQYNNWPPMYT

SEQ ID NO: 11813 - protein, 122 aa, Artificial Sequence
  Synthetic
EVQLVESGGGLVQPGGSLRLSCSASGFIFSTYAMHWVRQAPGKGLESVSTVSRDGGYTYYTDSVKGRFTISRDNSKNTLYLQMSSLRAEDTAVYYCVKDLGGGHWVDYFDYWGQGTLVTVSS

SEQ ID NO: 11814 - protein, 15 aa, Artificial Sequence
  Synthetic
VKDLGGGHWVDYFDY

SEQ ID NO: 11815 - protein, 107 aa, Artificial Sequence
  Synthetic
  misc_feature (9)..(10): Xaa can be any naturally occurring amino acid
DIQMTQSPXXLSASVGDRVTITCRASQSISSYLTWYQQRPGKAPKLLIYAASSLQSGVPSRFSGSGSGTVFTLTISGLQPEDFATYYCLQTYTTPYTFGQGTELEIK

SEQ ID NO: 11816 - protein, 9 aa, Artificial Sequence
  Synthetic
LQTYTTPYT

SEQ ID NO: 11817 - protein, 124 aa, Artificial Sequence
  Synthetic
QLQLQESGPRLVKPSETLSLTCSVSGGSISGTSYYWGWIRQPPGKGLEWIGNIFYRGRTYYNPSLKSRVTISVDTSKNQFSLKLSSVTAADTAVYYCARTYCNYGVCQEAFDMWGQGTMVTVSS

SEQ ID NO: 11818 - protein, 16 aa, Artificial Sequence
  Synthetic
ARTYCNYGVCQEAFDM

SEQ ID NO: 11819 - protein, 110 aa, Artificial Sequence
  Synthetic
SYVLTQPPSVSVAPGKTARITCGGNNIGSNSVHWYQQKPGQAPVLVVYGAGDRPSGIPERFSGSNSGNMATLTISRVEAGDEADYYCQVWDTSSDHPLYVFGTGTKVTVL

SEQ ID NO: 11820 - protein, 13 aa, Artificial Sequence
  Synthetic
QVWDTSSDHPLYV

SEQ ID NO: 11821 - protein, 120 aa, Artificial Sequence
  Synthetic
QVQLQESGPGLVKPSETLSLTCAVSRYSISSGYYWGWIRQPPGKGLEWIGDINYSGTTYYNPSLKRRVTMSVDTSKNQFSLKLTSVTAADTAVYYCARVHSFGLQPFDYWGQGTLVTVSS

SEQ ID NO: 11822 - protein, 13 aa, Artificial Sequence
  Synthetic
ARVHSFGLQPFDY

SEQ ID NO: 11823 - protein, 109 aa, Artificial Sequence
  Synthetic
QSVLTQPASVSGSPGQSISISCTGTSGDIGSYDLVSWYQQHPGKAPKLMIYEVNKRPSGISDRFSGSKSGNTASLTISGLQADDEADYYCCSYSPTTTVFGTGSKVTVL

SEQ ID NO: 11824 - protein, 9 aa, Artificial Sequence
  Synthetic
CSYSPTTTV

SEQ ID NO: 11825 - protein, 125 aa, Artificial Sequence
  Synthetic
QLQLQESGPRLLKPSETLSLTCTVSGGSVSSSTYYWGWIRQPPGKGLEWLGSIFYSGITYYNPSLQSRVSMSVDTSKNQFSLKLSSVTAADTAMYFCAREVRYCTSSICYTFDIWGQGTLLTVSS

SEQ ID NO: 11826 - protein, 17 aa, Artificial Sequence
  Synthetic
AREVRYCTSSICYTFDI

SEQ ID NO: 11827 - protein, 109 aa, Artificial Sequence
  Synthetic
QSVLTQPPSASGSPGQSVTIACTGTSSDVGSYDYVSWYQQHPGKAPKLMIYEVTKRPSGVPDRFSGSKSGNTASLTVSGLQAEDEADYYCYSYVGSNRLFGGGTKLTVL

SEQ ID NO: 11828 - protein, 9 aa, Artificial Sequence
  Synthetic
YSYVGSNRL

SEQ ID NO: 11829 - protein, 123 aa, Artificial Sequence
  Synthetic
EVQLVESGGGLIQPGGSLRLSCAASGIIVSANYMSWVRQAPGKGLEWVSVIYSGGSTFYADSVKGRFTISRDNSKNTLFLQMNSLRAEDTAVYFCARAVYCSGGTCYWGFDYWGQGALVTVSS

SEQ ID NO: 11830 - protein, 17 aa, Artificial Sequence
  Synthetic
ARAVYCSGGTCYWGFDY

SEQ ID NO: 11831 - protein, 112 aa, Artificial Sequence
  Synthetic
QSVLTQPPSVSGAPGQRVTISCTGSSSNIGAGYDVHWYQQLPGTAPKLLMYGNNNRPSGVPDRFSGSKSGTSASLAITGLQAEDEADYYCQSYDSSLSGLWVFGGGTKLTVL

SEQ ID NO: 11832 - protein, 12 aa, Artificial Sequence
  Synthetic
QSYDSSLSGLWV

SEQ ID NO: 11833 - protein, 125 aa, Artificial Sequence
  Synthetic
EVQLVESGGALVKPGGSLRLSCAASGFTFSKAWMNWVRQAPGKGLEWVGRIKTKADGGTTDYAAPVKGRFTISRDDSKNTLHLQMNSLKTEDTGVYYCTTPYDIFIGYHWGFDPWGQGTLVTVSS

SEQ ID NO: 11834 - protein, 16 aa, Artificial Sequence
  Synthetic
TTPYDIFIGYHWGFDP

SEQ ID NO: 11835 - protein, 108 aa, Artificial Sequence
  Synthetic
SYVLTQPPSVSVAPGNTATITCEGDDIGSKSVQWYQQKPGQAPVLVVYDDDDRPSGVPERFSGSNSGDTATLTISRVEAGDEADYSCQVWDSNSDHVVFGGGTKLTVL

SEQ ID NO: 11836 - protein, 11 aa, Artificial Sequence
  Synthetic
QVWDSNSDHVV

SEQ ID NO: 11837 - protein, 123 aa, Artificial Sequence
  Synthetic
QMQLVQSGPEVKKPGTSVKVSCKASGFTFSTSAVQWVRLARGQRLEWIGWIAVGRGNTNYAQKFQERVTITRDMSTNTAYMDLSSLRSEDTAVYYCGAPYCNRTTCSDAFDIWGQGTMITVSS

SEQ ID NO: 11838 - protein, 16 aa, Artificial Sequence
  Synthetic
GAPYCNRTTCSDAFDI

SEQ ID NO: 11839 - protein, 108 aa, Artificial Sequence
  Synthetic
EIVLTQSPGTLSVSPGERATLSCRASQSVRSGFFAWFQQKPGQAPRLVIYSASSRATGIPDRFSASGSGTDFTLTISRLEPEDFAVYYCQQYDTSPYTFGQGTHLEIK

SEQ ID NO: 11840 - protein, 9 aa, Artificial Sequence
  Synthetic
QQYDTSPYT

SEQ ID NO: 11841 - protein, 118 aa, Artificial Sequence
  Synthetic
EVQLVESGGGLVQPGGSLRLSCAASGLTVSSNYMTWVRQAPGKGLEWVSMIYSGGSTFYADSVKGRFTISRDNSKNTLYLQMTSLKAEDTAVYYCVRDRVGGVIIPTWGQGTLVTVSS

SEQ ID NO: 11842 - protein, 12 aa, Artificial Sequence
  Synthetic
VRDRVGGVIIPT

SEQ ID NO: 11843 - protein, 107 aa, Artificial Sequence
  Synthetic
DIQMTQSPSSLSASVGDRVTITCQASQDISNYLNWYQQKSGKAPKLLIYDASNLETGVPSRFSGSRSGTDFSFTISSLQPEDVATYYCHQYDNLPLTFGGGTKVEIK

SEQ ID NO: 11844 - protein, 9 aa, Artificial Sequence
  Synthetic
HQYDNLPLT

SEQ ID NO: 11845 - protein, 121 aa, Artificial Sequence
  Synthetic
QVQLVESGGGVVQPGRSLRLSCAASGFTFSSYAMHWVRQAPGKGLEWVAAISSDGSNKFYADSVKGRVTISRDNSKNTLYLQMNSLRAEDTAVYYCARESDILVVWAFDYWGQGTLVTVSS

SEQ ID NO: 11846 - protein, 14 aa, Artificial Sequence
  Synthetic
ARESDILVVWAFDY

SEQ ID NO: 11847 - protein, 108 aa, Artificial Sequence; identical to SEQ ID NO: 11615
  Synthetic

SEQ ID NO: 11848 - protein, 10 aa, Artificial Sequence
  Synthetic
QQSYSTPPGT

SEQ ID NO: 11849 - protein, 123 aa, Artificial Sequence
  Synthetic
EVQLVQSGAEVKKPGESLRISCKGSGYSFTSYWITWVRQMPGKGLEWMGRIDPSDSYTNYNPSLRVTISADKSISTAYLQWSSLKASDTAMYYCARHHPYSSSWYWGDAFDIWGQGTMVTVSS

SEQ ID NO: 11850 - protein, 18 aa, Artificial Sequence
  Synthetic
ARHHPYSSSWYWGDAFDI

SEQ ID NO: 11851 - protein, 107 aa, Artificial Sequence
  Synthetic
DIQMTQSPSSVSASVGDRVTITCRASQDISSWLAWYQQKPGKAPKLLIYAASSLQSGVPSRFSGSGSGTDFTLTISSLQPEDFATYYCQQANSPMVTFGPGTKVDIK

SEQ ID NO: 11852 - protein, 9 aa, Artificial Sequence
  Synthetic
QQANSPMVT

SEQ ID NO: 11853 - protein, 127 aa, Artificial Sequence
  Synthetic
EVQLVQSGAEVKKPGESLKISCKDSGYSSTSYWIGWVRQMPGKGLEWMGIIYLGDSDTRYNPSFQGQVTISADKSISTAYLQWSSLKASDTAIYYCARRSPLYDSNDYYSGDAFDIWGQGTVVTVSS

SEQ ID NO: 11854 - protein, 20 aa, Artificial Sequence
  Synthetic
ARRSPLYDSNDYYSGDAFDI

SEQ ID NO: 11855 - protein, 111 aa, Artificial Sequence
  Synthetic
QSVLTQPASVSGSPGQSITISCTGTSNDVGSYNLLSWYQHHPDKAPKLLIYEGAKRPSGVSNRFSGSSSGNTASLTISGLQTEDEADYYCCSYAVSSTFLVFGGGTKLTVL

SEQ ID NO: 11856 - protein, 11 aa, Artificial Sequence
  Synthetic
CSYAVSSTFLV

SEQ ID NO: 11857 - protein, 117 aa, Artificial Sequence
  Synthetic
QVQLQESGPGLVKPSETLSLTCTVSGGSISGHYCSWIRQFPGKGLEWIGYIYYSGSTNYNPSLKSRVTMSVDTSKNQFSLKMTSLTAADTAVYYCAREGSSGYFDPWGQGTRVTVSS

SEQ ID NO: 11858 - protein, 11 aa, Artificial Sequence
  Synthetic
AREGSSGYFDP

SEQ ID NO: 11859 - protein, 108 aa, Artificial Sequence
  Synthetic
  misc_feature (9)..(9): Xaa can be any naturally occurring amino acid
EIVLTQSPXSLSLSPGERATLSCRASQSLYSRNLAWYQQKPGQAPRLLIYGASSRATGIPDRFSGSGSGTDFTLTISRLEPEDFAVYYCHQYGSSWITFGQGTRLEIK

SEQ ID NO: 11860 - protein, 9 aa, Artificial Sequence
  Synthetic
HQYGSSWIT

SEQ ID NO: 11861 - protein, 121 aa, Artificial Sequence
  Synthetic
QVQLVESGGGVVQPGRSLRLSCAVSGFTFSTYGMHWFRQPPGKGLEWVAAISYDGSDKFYADSVKGRFTISRDNSKNTLYLQMNSLRPEDTAVYYCAKGGWFGDSVRCDYWGQGTLVTVSS

SEQ ID NO: 11862 - protein, 14 aa, Artificial Sequence
  Synthetic
AKGGWFGDSVRCDY

SEQ ID NO: 11863 - protein, 107 aa, Artificial Sequence
  Synthetic
DIQMTQSPSSLSASVGDRVTITCQASQDISNYLNWYQQKPGKAPKLLIFDASYLETGVPSRFSGSGSGTDFTFTISSLQPEDFATYYCQQYHNFPVAFGQGTKVEIK

SEQ ID NO: 11864 - protein, 9 aa, Artificial Sequence
  Synthetic
QQYHNFPVA

SEQ ID NO: 11865 - protein, 124 aa, Artificial Sequence
  Synthetic
EVQLVESGGGLVQPGGSLRLSCAASGFSFSTYDMHWVRQVPGKGLEWVSAIGTEGDTYYPDSVKGRFTISRENAKNSLYLQVNSLRAGDTAVYYCARGTHTYLHSHYYYYMDVWGKGTTVTVSS

SEQ ID NO: 11866 - protein, 18 aa, Artificial Sequence
  Synthetic
ARGTHTYLHSHYYYYMDV

SEQ ID NO: 11867 - protein, 108 aa, Artificial Sequence
  Synthetic
DIQMTQSPVSLSASVGDRVTITCRASQSISSYLNWYQQKSGKAPKLLIYAASTLHSGVPPRFSGSGSGTDFTLTISSLQPEDLATYYCQQSYVTTGYTFGQGTKLEIK

SEQ ID NO: 11868 - protein, 10 aa, Artificial Sequence
  Synthetic
QQSYVTTGYT

SEQ ID NO: 11869 - protein, 121 aa, Artificial Sequence
  Synthetic
QVQLVQSGAEVKKPGGSVKVSCKASGYTFSSYGMSWARQAPGQGLEWLGWISSYNGETNYAQKFQGRITMTTDTSTSTAYMELRSLRSDDTAVYYCAQKRLTTPGQVFDIWGQGTKVTVSS

SEQ ID NO: 11870 - protein, 14 aa, Artificial Sequence
  Synthetic
AQKRLTTPGQVFDI

SEQ ID NO: 11871 - protein, 112 aa, Artificial Sequence
  Synthetic
  misc_feature (10)..(10): Xaa can be any naturally occurring amino acid
DIVMTQSPVXLPVSPGEPASISCRSSQSLLHSNGYNYLDWYLQKPGQSPQLLIYLASNRASGVPDRFSGSGSGTDFTLKISRVEAEDVGVYYCMQALQPIFTFGPGTKVDIK

SEQ ID NO: 11872 - protein, 9 aa, Artificial Sequence
  Synthetic
MQALQPIFT

SEQ ID NO: 11873 - protein, 117 aa, Artificial Sequence
  Synthetic
EVQLVESGGGLVQPGGSLTLSCAASEIIVSSNYMTWVRQAPGKGPEWVSLLYAGGSTFYADSVKGRFTISRDNSKNTLYLHMNNLRAEDTAVYYCARDAGDDLLDFWGQGTLVTVSS

SEQ ID NO: 11874 - protein, 11 aa, Artificial Sequence
  Synthetic
ARDAGDDLLDF

SEQ ID NO: 11875 - protein, 109 aa, Artificial Sequence
  Synthetic
DIQLTQSPSFLSASVGDRVTITCRASQGISSYLAWYQQKPGKAPKLLIYAASTLQSGVPSRFSGSGSGTEFTLTISSLQPEDFATYYCQQLNSYPQMYNFGQGTKLEIK

SEQ ID NO: 11876 - protein, 11 aa, Artificial Sequence
  Synthetic
QQLNSYPQMYN

SEQ ID NO: 11877 - protein, 117 aa, Artificial Sequence
  Synthetic
QVQLQESGPGLVKPSETLSLTCNVSGNSVSSHYWSWIRRPPGKGLEWIGYIHKSGSTDYNPSLKSRVTISGDTSRNQFSLKLSSVTAADTALYYCATAFTPYYFDFWGQGALVTVSS

SEQ ID NO: 11878 - protein, 11 aa, Artificial Sequence
  Synthetic
ATAFTPYYFDF

SEQ ID NO: 11879 - protein, 112 aa, Artificial Sequence
  Synthetic
QSVLTQPPSVSGAPGQRVTISCTGSTSNLGAGFDVHWYRQFPGSAPKLLIYGSTERPSGVPDRFSGSKSGTSASLAITGLQAEDEADYYCQSYDSSLSAPYVFGTGTTVTVL

SEQ ID NO: 11880 - protein, 12 aa, Artificial Sequence
  Synthetic
QSYDSSLSAPYV

SEQ ID NO: 11881 - protein, 119 aa, Artificial Sequence
  Synthetic
QVQLVQSGPEVKKPGASVKVSCKTSGYSFTTYGISWVRQAPGQGLEWMGWISTNTGNTNYAQKLQDRVTMTRDTSTNTAYMELRSLRSDDTAVYFCARPRGYGDEIDYWGQGTLVTVSS

SEQ ID NO: 11882 - protein, 12 aa, Artificial Sequence
  Synthetic
ARPRGYGDEIDY

SEQ ID NO: 11883 - protein, 110 aa, Artificial Sequence
  Synthetic
QSVLTQPASVSGSPGQSITISCTGTSSDVGGYNYVSWYQQHPGKAPKLMIYDVSNRPSGVSNRFSGSKSGNTASLTISGLQAEDEADYYCSSYTINSRWVFGGGTKLTVL

SEQ ID NO: 11884 - protein, 10 aa, Artificial Sequence
  Synthetic
SSYTINSRWV

SEQ ID NO: 11885 - protein, 118 aa, Artificial Sequence
  Synthetic
EVQLVESGGGLVQPGGSLRLSCAASGLIVSSNYMSWVRQAPGRGLEWVSIIYSGGSTFYADSVKGRFTISRDNSKNTLYLQMNSLRAEDTAVYYCARVFPPSETFDYWGQGTLVTVSS

SEQ ID NO: 11886 - protein, 12 aa, Artificial Sequence
  Synthetic
ARVFPPSETFDY

SEQ ID NO: 11887 - protein, 108 aa, Artificial Sequence
  Synthetic
DIQMTQSPSSLSASVGDRVTITCQASQDIDNYLNWYQQKPGKAPKLLIYGASNLETGVPSRFSGSRSGRDFTFTISSLQPEDLATYYCQHYNNVAMYIFGQGTKLEIK

SEQ ID NO: 11888 - protein, 10 aa, Artificial Sequence
  Synthetic
QHYNNVAMYI

SEQ ID NO: 11889 - protein, 122 aa, Artificial Sequence
  Synthetic
QLQLQESGPGLVKPSETLSLTCTVSGGSISSSTYYWGWIRQPPGKGLEWIGNIYYSGITYYNPSLKSRVTISVDTSTNHFSLKLSSVTAADTAVYYCARFHRWSGHYYFDYWGQGTLVTVSS

SEQ ID NO: 11890 - protein, 14 aa, Artificial Sequence
  Synthetic
ARFHRWSGHYYFDY

SEQ ID NO: 11891 - protein, 109 aa, Artificial Sequence
  Synthetic
QSVLTQPRSVSGSPGQSVTISCTGTSSDVGGYDYVSWYQQHPGKAPKLMIYDVTKRPSGVPDRFSGSKSGNTASLTISGLQAEDEADYYCCSYVGSDTLFGTGTKVTVL

SEQ ID NO: 11892 - protein, 9 aa, Artificial Sequence
  Synthetic
CSYVGSDTL

SEQ ID NO: 11893 - protein, 122 aa, Artificial Sequence
  Synthetic
QVQLVESGGGVVQPGGSLRLSCAASGFTFRDYGMHWVRQAPGKGLEWVAVIWYDGGNKYYADSVKGRLTISRDNSKNTLYLQMNSLRAEDTAVYYCARDQDSSGWYGGFDYWGQGTLVTVSS

SEQ ID NO: 11894 - protein, 15 aa, Artificial Sequence
  Synthetic
ARDQDSSGWYGGFDY

SEQ ID NO: 11895 - protein, 109 aa, Artificial Sequence
  Synthetic
QSVLTQPASVSGSPGQSITLSCTGASIDVGSFNRVSWYQKHPGKAPKLMIYEDTKRPSGVSNRFSGSKSGNTASLTISGLQAEDEADYYCCSYAGALWMFGGGTKLTVL

SEQ ID NO: 11896 - protein, 9 aa, Artificial Sequence
  Synthetic
CSYAGALWM

SEQ ID NO: 11897 - protein, 119 aa, Artificial Sequence
  Synthetic
QLQLQESGPRLVKPSETLSLTCSVSADSSDTSNYYCAWIRQPPGKGLEWVGSIYYSGSTYHNPSLKSRVTMSLDTSKKQFSLKLSAVTAADTAVYYCARPHIPFEYFPQWGQGTLVIVS

SEQ ID NO: 11898 - protein, 12 aa, Artificial Sequence
  Synthetic
ARPHIPFEYFPQ

SEQ ID NO: 11899 - protein, 113 aa, Artificial Sequence
  Synthetic
DIVMTQSPDSLAVSLGERASINCKSSQSLLYSSNNKNYLAWYQQKPGQPPKLLINWASTRESGVPDRFSGSGSGTDFSLTISGLQAEDVAVYYCQQYYISPLTFGPGTKVDIK

SEQ ID NO: 11900 - protein, 9 aa, Artificial Sequence
  Synthetic
QQYYISPLT

SEQ ID NO: 11901 - protein, 123 aa, Artificial Sequence
  Synthetic
QMQLVQSGPEVKKPGTSVKVSCKASGFTFSSSAMQWVRQARGQRLEWIGWIVVGSGNTKYEQKFQERVTITRDMSTSTAYMELSSLRSEDTAVYYCAAPYCNRTSCNDAFDIWGQGTMVTVSS

SEQ ID NO: 11902 - protein, 16 aa, Artificial Sequence
  Synthetic
AAPYCNRTSCNDAFDI

SEQ ID NO: 11903 - protein, 108 aa, Artificial Sequence
  Synthetic
EIVLTQSPGTLSLSLGERATLSCRASQSISSSYLAWYQQKPGQAPRLLIYGASRRATGIPDRFSGSGSGTDFTLTISRLEPEDFAVYSCQQFGRSPWTFGQGTKVEIK

SEQ ID NO: 11904 - protein, 9 aa, Artificial Sequence
  Synthetic
QQFGRSPWT

SEQ ID NO: 11905 - protein, 123 aa, Artificial Sequence
  Synthetic
QVQLVQSGAEVKKPGSSVKVSCKASGGTFSSYAFSWVRQAPGHGLEWMGGIIPIIGASNSAQNFQGRVTLAADESTTTVYMELSSLRFEDTAVYYCARNAKDYGDYLGPFDIWGQGTMVTVSS

SEQ ID NO: 11906 - protein, 16 aa, Artificial Sequence
  Synthetic
ARNAKDYGDYLGPFDI

SEQ ID NO: 11907 - protein, 109 aa, Artificial Sequence
  Synthetic
EIVMTQSPATLSVSPGERATLSCRASQSVGSNLAWYQQKPGQAPRLLIYGDSTRATGIPARFSGSGSGTEFTLTISGLQSEDFAVYYCQQYNNWPPTYTFGQGTKLEIK

SEQ ID NO: 11908 - protein, 11 aa, Artificial Sequence
  Synthetic
QQYNNWPPTYT

SEQ ID NO: 11909 - protein, 126 aa, Artificial Sequence
  Synthetic
EVQLVQSGAEVKKPGESLRISCKGSGYSFTNYYISWVRQMPGKGLEWMGNIDPGDSYTNYSPSFQGHVTISVDKSISSVSLQWSRLKASDTAMYYCAKPGGSIYQPLPMGFAFEIWGQGTMVTVSS

SEQ ID NO: 11910 - protein, 19 aa, Artificial Sequence
  Synthetic
AKPGGSIYQPLPMGFAFEI

SEQ ID NO: 11911 - protein, 111 aa, Artificial Sequence
  Synthetic
QSVLTQPPSASGSPGQSVTISCTGTSSDVGGYNYVSWYQQHPGKAPKLMIYEVNKRPSGVPDRFSGSKSGNTASLTVSGLQAEDEADYYCSSYAGINTFGVFGGGTRLTVL

SEQ ID NO: 11912 - protein, 11 aa, Artificial Sequence
  Synthetic
SSYAGINTFGV

SEQ ID NO: 11913 - protein, 119 aa, Artificial Sequence
  Synthetic
QVQLQESGPGLVKPSQTLSLTCTVSGDSISSGGYYWNWIRQPPGKGLEWIGYIYYSATTYYNPSLKSRVSISVDTSMNHFSLKLSSVTAADTAVYYCAREGQGGYMIVWGKGTTVTVSS

SEQ ID NO: 11914 - protein, 11 aa, Artificial Sequence
  Synthetic
AREGQGGYMIV

SEQ ID NO: 11915 - protein, 108 aa, Artificial Sequence
  Synthetic
EIVLTQSPGTLSLSPGERASLSCRASQSLTSGYLAWYQQKPGQAPRLLIYGASRRATGIPDRFSGSGSGTDFTLTISRLEPEDFAVYYCQQYGGSVYTFGQGTKVEIK

SEQ ID NO: 11916 - protein, 9 aa, Artificial Sequence
  Synthetic
QQYGGSVYT

SEQ ID NO: 11917 - protein, 119 aa, Artificial Sequence
  Synthetic
QVQLVQSGAEVKKPGASVKVSCKASGYTFTSYGISWVRQAPGQGLEWMGWISTYNGNTKYAQKFQGRVTMTTDTSTSTAYMELRSLRSDDTAVYYCSRCQGVWFGNLLWGQGTLVTVSS

SEQ ID NO: 11918 - protein, 12 aa, Artificial Sequence
  Synthetic
SRCQGVWFGNLL

SEQ ID NO: 11919 - protein, 110 aa, Artificial Sequence
  Synthetic
NFMLTQPHSMSESPGKTVTISCTGSSGSIATNYVQWYQQRPGSAPTTVIYEDNQRPSGVPDRFSGSIDSSSNSASLTISGLKTEDEADYYCQSYDGTNQVFGGGTKLTVL

SEQ ID NO: 11920 - protein, 9 aa, Artificial Sequence
  Synthetic
QSYDGTNQV

SEQ ID NO: 11921 - protein, 123 aa, Artificial Sequence
  Synthetic
QMQLVQSGPEVKKPGTSVKVSCKASGFTFTTSAIQWVRQARGQRLEWMGWIVVGSGNTDYGQKFQERVTIARDMSTNTAYMELSSLRSEDTAVYYCAAPNCNSTSCSDGFDIWGQGTRVTVSS

SEQ ID NO: 11922 - protein, 16 aa, Artificial Sequence
  Synthetic
AAPNCNSTSCSDGFDI

SEQ ID NO: 11923 - protein, 108 aa, Artificial Sequence
  Synthetic
EIVLTQSPGTLSLSPGERATLSCRASQSIRIGYLAWYQQKPGQAPRLLIDGASSRATGIPDRFSGSGSGTDFTLTISRLEPEDFAVYYCQQYGSSPWTFGQGTKVEIK

SEQ ID NO: 11924 - protein, 9 aa, Artificial Sequence
  Synthetic
QQYGSSPWT

SEQ ID NO: 11925 - protein, 120 aa, Artificial Sequence
  Synthetic
QVQLVESGGGLVKPGGSLRLSCAASGFTFSDCYMSWIRQAPGKGLEWISYISHTSSFTNSADSVKGRFTISRDNAKNSLYLQMNSLRAEDTAVYYCAKGIVGATTVFDSWGQGTLVTVSS

SEQ ID NO: 11926 - protein, 13 aa, Artificial Sequence
  Synthetic
AKGIVGATTVFDS

SEQ ID NO: 11927 - protein, 106 aa, Artificial Sequence
  Synthetic
DIQMTQSPSSLAASVGDRVSITCRASQNINTYLNWYQQKPGKAPKLLIYAASSLQVGVPSRFTGSGSGTDFTLTISSLQPEDFATYFCQQGYSAPAFGQGTKVEIK

SEQ ID NO: 11928 - protein, 8 aa, Artificial Sequence
  Synthetic
QQGYSAPA

SEQ ID NO: 11929 - protein, 123 aa, Artificial Sequence
  Synthetic
QMQLVQSGPEVKKPGTSVKVSCKASGFTFYSSAVQWVRQARGQRLEWIGWIVVGSGNTNYAQKFQERVTISRDMSTDTAYMELSSLRSEDTAMYFCAAPYCSRTSCADGFDIWGQGTTVTVSS

SEQ ID NO: 11930 - protein, 16 aa, Artificial Sequence
  Synthetic
AAPYCSRTSCADGFDI

SEQ ID NO: 11931 - protein, 107 aa, Artificial Sequence
  Synthetic
EIVLTQSPGTLSLSPGERATLSCRASQRVRSGYLAWYQQKPGQAPRLLIYGTSMRATGIPDRFSASVSGTDFTLTISRLEPEDFAVYYCQQFGSSPWTFGQGTKVEI

SEQ ID NO: 11932 - protein, 9 aa, Artificial Sequence
  Synthetic
QQFGSSPWT

SEQ ID NO: 11933 - protein, 119 aa, Artificial Sequence
  Synthetic
EVQLVESGGGLVQPGGSLRLSCTASEIIVSRNYMSWVRQAPGKGLEWVSVLYSGGTTYYADSVKGRFTISRDDSKNTLYLQMSSLRAEDTAVYYCARLLVATIADYDFWGQGTLVTVSS

SEQ ID NO: 11934 - protein, 13 aa, Artificial Sequence
  Synthetic
ARLLVATIADYDF

SEQ ID NO: 11935 - protein, 108 aa, Artificial Sequence
  Synthetic
EIVMTQSPATLSVSPGERATLSCRASQSVSSNLAWYQQKPGQAPRLLIYGASTRATGIPARFSGSGSGTEFTLTISSLQSEDFAVYYCQQYNDWPPWTFGQGTQVEIK

SEQ ID NO: 11936 - protein, 10 aa, Artificial Sequence
  Synthetic
QQYNDWPPWT

SEQ ID NO: 11937 - protein, 122 aa, Artificial Sequence
  Synthetic
QVQLVESGGGVVQPGRSLRLSCAASGFTFSSYGMHWVRQAPGKGLEWVAVIWYNGRNKYYTDSVKGRFTISRDNSKNTLYLQMNSLRAEDTALYYCAREAGDPTVTTEFDYWGQGTLVTVSS

SEQ ID NO: 11938 - protein, 15 aa, Artificial Sequence
  Synthetic
AREAGDPTVTTEFDY

SEQ ID NO: 11939 - protein, 111 aa, Artificial Sequence
  Synthetic
QSVLTQPPSVSGAPGQRVTISCTGSSSNIGAGYAVHWYQHLPGRAPKLLIYDNSNRPSGVPDRFSGSKSGTSASLAITGLQAEDEADYYCQSYDRSLSGYVFGTGTKVTVL

SEQ ID NO: 11940 - protein, 11 aa, Artificial Sequence
  Synthetic
QSYDRSLSGYV

SEQ ID NO: 11941 - protein, 125 aa, Artificial Sequence
  Synthetic
QVQLVESGGGVVQPGRSLRLSCAVFGFTFSNYGVHWVRQAPGKGLEWVAFISYDGNNRFYGDSVKGRFTISRDNPKNTLYLQMNSLRAEDTAVYYCAREYAYDSSTYSANAFDIWGQGTMVTVSS

SEQ ID NO: 11942 - protein, 18 aa, Artificial Sequence
  Synthetic
AREYAYDSSTYSANAFDI

SEQ ID NO: 11943 - protein, 105 aa, Artificial Sequence
  Synthetic
SYVLTQPPSVSVAPGKTARITCGGDSIGSKSVHWYQQKPGQAPVLVIYYDSDRPSGIPERFSGSNSGNTATLTISRVEAGDEADYYCQVWDVGVVFGGGTKLTVL

SEQ ID NO: 11944 - protein, 8 aa, Artificial Sequence
  Synthetic
QVWDVGVV

SEQ ID NO: 11945 - protein, 121 aa, Artificial Sequence
  Synthetic
EVQLVESGGGLVQPGGSLRLSCTASGFSFSRYSLDWVRQAPGKGLEWVSYIGSSSPSIKYAESVKGRFTISRDNAKNSLYLQMNSLRVEDTAVYYCARELPGDYPYLFDYWGQGTLVTVSS

SEQ ID NO: 11946 - protein, 14 aa, Artificial Sequence
  Synthetic
ARELPGDYPYLFDY

SEQ ID NO: 11947 - protein, 108 aa, Artificial Sequence
  Synthetic
SYVLTQPPSVSVAPGKTASITCGGNNIGSKSVHWYQQKPGQAPVLVIYYDSDRPSGIPERFSGSNSGNTATLTISRVEAGDEADYYCQVWDSTSDHKVFGGGTKLTVL

SEQ ID NO: 11948 - protein, 11 aa, Artificial Sequence
  Synthetic
QVWDSTSDHKV

SEQ ID NO: 11949 - protein, 129 aa, Artificial Sequence
  Synthetic
EVQLLESGGGLAQPGGSLRLSCAASGFTFSRYAMSWVRQAPGKGLEWVSAISGSGAISGSGDNTYYADSVKGRFIISRDNSKNTVYLQMNSLRAEDTAVYYCAKGYSSGWQRVNWFDPWGQGSLVTVSS

SEQ ID NO: 11950 - protein, 16 aa, Artificial Sequence
  Synthetic
AKGYSSGWQRVNWFDP

SEQ ID NO: 11951 - protein, 110 aa, Artificial Sequence
  Synthetic
EIVLTQSPGTLSLSPGERATLSCRASQSVSSNYLAWYQQKPGQAPRLLIYNTSSRATGIPDRFSGSGSGTDFTLTISRLEPEDFAVYYCQQYGSSPPLYSFGQGTKLEIK

SEQ ID NO: 11952 - protein, 11 aa, Artificial Sequence
  Synthetic
QQYGSSPPLYS

SEQ ID NO: 11953 - protein, 118 aa, Artificial Sequence
  Synthetic
EVQLVESGGGLVQPGGSLRLSCAASGITVSRNYMSWVRQAPGKGLEWVSLIYSGGSTFYADSVKGRFTISRDNSNNTLYLQMNSLRAEDTAVFYCARLLPAYDYMDVWGKGTTVTVSS

SEQ ID NO: 11954 - protein, 12 aa, Artificial Sequence
  Synthetic
ARLLPAYDYMDV

SEQ ID NO: 11955 - protein, 110 aa, Artificial Sequence
  Synthetic
DIQMTQSPSSLSASVGDRVSITCRASQNIATYLNWYQQKPGKAPKLLIYAASTLQSGVPSRFSGSGSGTDFTLTLSSLQPDDLATYYCQESYSLPPEMHTFGQGTKLEIK

SEQ ID NO: 11956 - protein, 12 aa, Artificial Sequence
  Synthetic
QESYSLPPEMHT

SEQ ID NO: 11957 - protein, 125 aa, Artificial Sequence
  Synthetic
EVQLVESGGGLVKPGGSLRVSCAASGFTFSDAWMSWVRQAPGKGLEWVGHIKSKLDGWTTDYAAPVKGRFTISRDDSKNTLYLQMNSLKTEDTAVYYCTTGGIVGYYYYYYMDVWGKGTTVTVSS

SEQ ID NO: 11958 - protein, 16 aa, Artificial Sequence
  Synthetic
TTGGIVGYYYYYYMDV

SEQ ID NO: 11959 - protein, 107 aa, Artificial Sequence
  Synthetic
DIQMTQSPSSLSASVGDRVTITCRASQSITNYLNWYQQKPGKAPKLLIYAASSLHSGVPSRFSGSGSGTDFTLSISSLQPEDFATYYCQQSYSAPHTFGQGTKLEIK

SEQ ID NO: 11960 - protein, 9 aa, Artificial Sequence
  Synthetic
QQSYSAPHT

SEQ ID NO: 11961 - protein, 122 aa, Artificial Sequence
  Synthetic
QVQLVQSGAEVKKPGASLKVSCKASRDTFTNYYFHWVRQAPEQGLEWMGIINPSGGSTTYSQKFQGRVTMTGDTSTSTVYMELSSLRSEDTAVYYCARGGLVPAASEVIDSWGQGTLVTVSS

SEQ ID NO: 11962 - protein, 15 aa, Artificial Sequence
  Synthetic
ARGGLVPAASEVIDS

SEQ ID NO: 11963 - protein, 108 aa, Artificial Sequence
  Synthetic
  misc_feature (10)..(10): Xaa can be any naturally occurring amino acid
EIVLTQSPVXLSLSPGERATLSCRASQSVSRYLAWYQQKPGQAPRLLIYDASNRATGIPPRFSGSGSGTDFTLTISSLEPEDFAVYYCQQRSNWPPFTFGQGTRLEIK

SEQ ID NO: 11964 - protein, 10 aa, Artificial Sequence
  Synthetic
QQRSNWPPFT

SEQ ID NO: 11965 - protein, 125 aa, Artificial Sequence
  Synthetic
QLQLQESGPGLVKPSETLSLTCTVSGGSISSSSFYWGWIRQPPGKGLEWIGSIYYSGITYYNPSLQSRVTISVDTSKNQFSLKVSSVSAADTAVYYCARVSRYCGSTTCYEFDYWGQGTLVSVSS

SEQ ID NO: 11966 - protein, 17 aa, Artificial Sequence
  Synthetic
ARVSRYCGSTTCYEFDY

SEQ ID NO: 11967 - protein, 108 aa, Artificial Sequence
  Synthetic
QSVLTQPRSVSGSPGQSVTISCTGTSSDVGSYDYVSWYQQHPGKAPKLMIYDVSERPSGVPDRFSGSKSGNTASLTISGLQADDEADYYCCSYAGIYLFGTGTKVTVL

SEQ ID NO: 11968 - protein, 8 aa, Artificial Sequence
  Synthetic
CSYAGIYL

SEQ ID NO: 11969 - protein, 128 aa, Artificial Sequence
  Synthetic
QVQLQESGPGLVKPSQTLSLTCTVSGGSISSGNYYWNWIRQPPGKGLEWIGCIYYSGSTYYNPSLKSRISISVDTSENQFSLKLSSVTAADTAVYYCAREPSGYYDSSGYYHHAFDIWGQGTMVTVSS

SEQ ID NO: 11970 - protein, 20 aa, Artificial Sequence
  Synthetic
AREPSGYYDSSGYYHHAFDI

SEQ ID NO: 11971 - protein, 110 aa, Artificial Sequence
  Synthetic
QSVLTQPASVSGSPGQSITISCTGTSSDVGSYNLVSWYQQHPGKAPKLMIYEGSKRPSGVSNRFSGSKSGNTASLTISGLQAEDEADYYCCSYAGSTIRFFGGGTKLTVL

SEQ ID NO: 11972 - protein, 10 aa, Artificial Sequence
  Synthetic
CSYAGSTIRF

SEQ ID NO: 11973 - protein, 122 aa, Artificial Sequence
  Synthetic
EVQLVESGGGLVQPGGSLRLSCSTSGFTFNYYAMYWLRLAPGKGLEYVSAISSDGALTYYADSVKGRFTISRDNSKNTLYLQMSSLRAEDTAVYYCVKDFGHNTWYDVFDFWGQGTMVTVSS

SEQ ID NO: 11974 - protein, 15 aa, Artificial Sequence
  Synthetic
VKDFGHNTWYDVFDF

SEQ ID NO: 11975 - protein, 107 aa, Artificial Sequence
  Synthetic
DIQMTQSPSSLSASVGDRVTITCRASQSITNYLNWYQQKPGKAPKLLIYGASSLQSGVPSRFSGSGSGTEFTLTISSLQPEDFATYYCQQSYSSPPTFGGGTKVEIK

SEQ ID NO: 11976 - protein, 9 aa, Artificial Sequence
  Synthetic
QQSYSSPPT

SEQ ID NO: 11977 - protein, 125 aa, Artificial Sequence
  Synthetic
QLQLQESGPGLVKPSETLSLTCTVSGGSISSSNYYWGWIRQPPGKGLEWIASVYYSGSTYSKPSLKSRVTISVDTSKNQFSLRLSSVTAADTAVYFCARFVRQLSSGNHACAFDIWGQGTMVTVS

SEQ ID NO: 11978 - protein, 18 aa, Artificial Sequence
  Synthetic
ARFVRQLSSGNHACAFDI

SEQ ID NO: 11979 - protein, 108 aa, Artificial Sequence
  Synthetic
QSALTQPASVSGSPGQSITISCTGTSSDVGSYDLVSWYQQHPGKAPKLMIYEVTERPSGVSNRFSGSKSGNTASLTISGLQAADEADYYCCSYAGTVLFGGGTRLTVL

SEQ ID NO: 11980 - protein, 8 aa, Artificial Sequence
  Synthetic
CSYAGTVL

SEQ ID NO: 11981 - protein, 117 aa, Artificial Sequence
  Synthetic
EVQLVESGGGLVQPGGSLRLSCAASGIIVSSNYMTWVRQAPGKGLEWVSVIYSGGSTFYADSVKDRFTISRDNSKNTLYLQMNNLRDEDTAVYYCARDLWGRGLDIWGQGTMVTVSS

SEQ ID NO: 11982 - protein, 11 aa, Artificial Sequence
  Synthetic
ARDLWGRGLDI

SEQ ID NO: 11983 - protein, 107 aa, Artificial Sequence
  Synthetic
DIQLTQSPSFLSASVGDRVTITCRASQGISSYLAWYQQRPGKAPKLLIYDASTLQSGVPSRFGGSGSGTEFTLTISSLQPEDSATYYCQLLNSYPHPTFGGGTKVEI

SEQ ID NO: 11984 - protein, 10 aa, Artificial Sequence
  Synthetic
QLLNSYPHPT

SEQ ID NO: 11985 - protein, 121 aa, Artificial Sequence
  Synthetic
QVQLVESGGGVVQPGRSLRLSCAASGFTFSTYAMHWVRQAPGKGLEWVAVISYDGSDKYYADSVKGRFTISRDNSKSTLYLQMNSLRAEDSAVYYCAKGGGYSYYYYMDVWGKGTTVTVSS

SEQ ID NO: 11986 - protein, 14 aa, Artificial Sequence
  Synthetic
AKGGGYSYYYYMDV

SEQ ID NO: 11987 - protein, 107 aa, Artificial Sequence
  Synthetic
DIQMTQSPSSLSASVGDRVTITCQASRDISNYLNWYQQKPGKAPKLLIYDASDLETGVPSRFSGSGSGTDFTFTISSLQPEDIATYYCQQYDNLPLTFGQGTRLEIK

SEQ ID NO: 11988 - protein, 9 aa, Artificial Sequence
  Synthetic
QQYDNLPLT

SEQ ID NO: 11989 - protein, 125 aa, Artificial Sequence
  Synthetic
EVQLVESGGGLVQPGGSLRLACAASGFTFSSYSMNWVRQAPGKGLEWVSYISSRSSTIYYADSVKGRFTISRDNAKNSLYLQMNSLRAEDTALYYCASGFRYRSSSAYYYYMDVWGKGTTVTVSS

SEQ ID NO: 11990 - protein, 18 aa, Artificial Sequence
  Synthetic
ASGFRYRSSSAYYYYMDV

SEQ ID NO: 11991 - protein, 109 aa, Artificial Sequence
  Synthetic
QSVLTQPASVSGSPGQSITISCTGTSSDVGSYNLVSWYQQHPGKAPKLIIYEVSQRPSGVSNRFSGSKSGNTASLTISGLQAEDEADYYCCSYVGNNTLFGGGTKLTVL

SEQ ID NO: 11992 - protein, 9 aa, Artificial Sequence
  Synthetic
CSYVGNNTL

SEQ ID NO: 11993 - protein, 123 aa, Artificial Sequence
  Synthetic
QVQLQESGPGLVKPSQTLSLTCTVSGGSISSGNYYWSWIRQHPGKGLEWIGYIYYSGVTYYNPSLKSRVTISVDTSNNQFSLKLGSVTAADTAVYYCARLNRVYGSGRALDYWGQGILVTVSS

SEQ ID NO: 11994 - protein, 15 aa, Artificial Sequence
  Synthetic
ARLNRVYGSGRALDY

SEQ ID NO: 11995 - protein, 110 aa, Artificial Sequence
  Synthetic
QSVLTQPASVSGSPGQSITISCTGTSSDVGSYNLVSWYQQHPGKAPKLVIYEDIERPSGVSNRFSGSKSGNTASLTVSGLRAEDEGDSYFCAYAGGSNLVFGGGTKLTVL

SEQ ID NO: 11996 - protein, 10 aa, Artificial Sequence
  Synthetic
CAYAGGSNLV

SEQ ID NO: 11997 - protein, 124 aa, Artificial Sequence
  Synthetic
QVQLVESGGGLVKPGGSLRLSCAASGFTFSDYYMSWIRQAPGKGLEWVSYISMISSYRNYADSVKGRFTISRDNAENSLYLEMNSLRAEDTAVYYCARVGEYVGATGGWYMDVWGKGTTVTVSS

SEQ ID NO: 11998 - protein, 17 aa, Artificial Sequence
  Synthetic
ARVGEYVGATGGWYMDV

SEQ ID NO: 11999 - protein, 107 aa, Artificial Sequence
  Synthetic
DIQMTQSPSSLSASVGDRVTITCRASQSISSYLNWYQQKPGKAPKFLIYAASSLQSGVPSTFSGSGSGTDFTLTISSLQPEDFATYYCQQTYSTSWTFGQGTKVEIK

SEQ ID NO: 12000 - protein, 9 aa, Artificial Sequence
  Synthetic
QQTYSTSWT

SEQ ID NO: 12001 - protein, 133 aa, Artificial Sequence
  Synthetic
QLQLQESGPGLVKPSETLSLTCTVSGGSISSSSYYWGWIRQPPGKGLEWIGSIFHIGNTFYKPSLKSRVTISVDTSKNQFSLRLSSVTAADTAVYYCAIQRRDGFNYRFEGRGEIYYYYMDVWGKGTTVTVSS

SEQ ID NO: 12002 - protein, 25 aa, Artificial Sequence
  Synthetic
AIQRRDGFNYRFEGRGEIYYYYMDV

SEQ ID NO: 12003 - protein, 113 aa, Artificial Sequence
  Synthetic
QSVLTQPPSVSGAPGQRVTISCTGSSSNIGADYDVHWYQHLPGTAPKLLIYGNNNRPSGVPDRFSGSKSGTSASLAITGLQAEDEADYYCQSYDSSLSDWDVVFGGGTKLTVL

SEQ ID NO: 12004 - protein, 13 aa, Artificial Sequence
  Synthetic
QSYDSSLSDWDVV

SEQ ID NO: 12005 - protein, 123 aa, Artificial Sequence
  Synthetic
QVQLVESGGGVVQPGRSLRLSCAASGFTFRSYAMHWVRQAPGKGLEWVALISSDGTNKYYADSVKGRFTISRDNSKNTLSLHMSSLRPEDTAVYYCAKQVSLYDNPLYYFDYWGQGTLVTVSS

SEQ ID NO: 12006 - protein, 16 aa, Artificial Sequence
  Synthetic
AKQVSLYDNPLYYFDY

SEQ ID NO: 12007 - protein, 107 aa, Artificial Sequence
  Synthetic
DIQMTQSPSSLSASVGDRVTITCQASQDISNSLNWYQQKPGKAPKLLLYDASNLETGVPSRFSGSGTGTDFTFTISSLQPEDIATYYCQQYDNLPPTFGQGTKLEIK

SEQ ID NO: 12008 - protein, 9 aa, Artificial Sequence
  Synthetic
QQYDNLPPT

SEQ ID NO: 12009 - protein, 126 aa, Artificial Sequence
  Synthetic
EVQLVESGGGLVQPGGSLRLSCAASGFTFSTYWMSWVRQAPGKGLEWVAKIKQDGSEKYYVDSVKGRFTISRDNAKNSLYLQMNSLRAEDTAVYYCARHAQQLVPYYYFYYYMDVWGKGTTVTVSS

SEQ ID NO: 12010 - protein, 19 aa, Artificial Sequence
  Synthetic
ARHAQQLVPYYYFYYYMDV

SEQ ID NO: 12011 - protein, 108 aa, Artificial Sequence
  Synthetic
EIVMTQSPATLSVSPGERVTLSCRASQSVISDLAWYQQKPGQAPRLLIYGASTRATDIPARFSGSGSGTEFTLTISSLQSEDFAVYYCQQYNNWPPVTFGGGTKVEIK

SEQ ID NO: 12012 - protein, 10 aa, Artificial Sequence
  Synthetic
QQYNNWPPVT

SEQ ID NO: 12013 - protein, 124 aa, Artificial Sequence
  Synthetic
QVQLVESGGGVVQPGRSLRLSCAASGFTFSSRTMHWVRQAPGKGLEWVAALSDDGSIKHYADSVRGRFTVSRDNSKNTLYLQMNSLRHDDTAVYYCARDCGTSCYVATDAFDFWGQGTMVTVSS

SEQ ID NO: 12014 - protein, 17 aa, Artificial Sequence
  Synthetic
ARDCGTSCYVATDAFDF

SEQ ID NO: 12015 - protein, 106 aa, Artificial Sequence
  Synthetic
DIQMTQSPSSLSASVGDRVTITCRASQSISNYLNWYQHKPGKAPELLIYAASSLQSGVPSRFSGSGSATDFTLTISSLQPEDFAVYYCQQSYSTPWTFGQGTKVEI

SEQ ID NO: 12016 - protein, 9 aa, Artificial Sequence
  Synthetic
QQSYSTPWT

SEQ ID NO: 12017 - protein, 131 aa, Artificial Sequence
  Synthetic
QVQLVQSGAEVGKPGSSVKVSCKASGGTFSSSAISWVRQAPGQGLEWMGAIIPIFGTANYAQKFQGRVTITADESTSTAYMDLSGLRSEDTALYYCAREPTVTNLPAAHLKSYYYYYMDVWGKGTTVTVSS

SEQ ID NO: 12018 - protein, 24 aa, Artificial Sequence
  Synthetic
AREPTVTNLPAAHLKSYYYYYMDV

SEQ ID NO: 12019 - protein, 108 aa, Artificial Sequence
  Synthetic
EIVLTQSPGTLSLSPGERATLSCRASQSLSSFYLAWYQQKPGQAPRLLIYGASSRATGIPDRFSGSGSGTDFTLTISRLEPEDFAVYYCQQYGSSFITFGQGTRLEIK

SEQ ID NO: 12020 - protein, 9 aa, Artificial Sequence
  Synthetic
QQYGSSFIT

SEQ ID NO: 12021 - protein, 116 aa, Artificial Sequence
  Synthetic
EVQLVESGGGLVQPGGSLRLTCAASVIAVSSNYMNWVRQAPGKGLEWVSLIYPGGTTYYADSVKGRFTISRDSSENTLYLQMNSLRAEDTAVYYCARDLGDSRMDYWGQGTLVTVS

SEQ ID NO: 12022 - protein, 11 aa, Artificial Sequence
  Synthetic
ARDLGDSRMDY

SEQ ID NO: 12023 - protein, 108 aa, Artificial Sequence
  Synthetic
DIQLTQSPSFLSASVGDSVTITCRASQGISTYLAWYQQKPGKAPKLLIYAASTLQSGVPSRFSGSGSGTEFTLTISSLQPEDFATYYCQQLNSYPPITFGQGTRLEIK

SEQ ID NO: 12024 - protein, 10 aa, Artificial Sequence
  Synthetic
QQLNSYPPIT

SEQ ID NO: 12025 - protein, 121 aa, Artificial Sequence
  Synthetic
QVQLQESGPGLVKPSQTLSLTCTVSGGSISSYGYYWSWIRQHPGRGLEWIGHVYYSGSTYYNPSLKSRVTISVDTSKNHFSLNLSSVTAADTAVYYCARELTGGLALFQHWGQGTLVTVSS

SEQ ID NO: 12026 - protein, 13 aa, Artificial Sequence
  Synthetic
ARELTGGLALFQH

SEQ ID NO: 12027 - protein, 107 aa, Artificial Sequence
  Synthetic
DIQMTQSPSSLSASVGDRVTITCQASQDISDYLNWYQQKPGKAPNLLIYSASKLETGVSSRFGGSGSGTHFTFTISSLQPEDIATYYCQQYDNLPWTFGQGTTVEIK

SEQ ID NO: 12028 - protein, 9 aa, Artificial Sequence
  Synthetic
QQYDNLPWT

SEQ ID NO: 12029 - protein, 125 aa, Artificial Sequence
  Synthetic
QVQLVQSGAEVKPPGSSVKVSCKSSGGTFSNYAISWVRQAPGQGLEWMGGIIPIFGTANYAQKFQGRVTITADKSTSTAYMELGSLRSEDTAVYYCARVGGQCEEWLRCWYFDYWGQGTLVTVSS

SEQ ID NO: 12030 - protein, 18 aa, Artificial Sequence
  Synthetic
ARVGGQCEEWLRCWYFDY

SEQ ID NO: 12031 - protein, 114 aa, Artificial Sequence
  Synthetic
DIVMTQSPDSLAVSLGERATINCKSSQSVLYSSNDKNYLAWYQQKPGQPPKLLIYWAFTLDSGVPDRFSGSGFGTDFTLTISSLQAEDVAVYYCQQYYDTPPCTFGQGTKLEIK

SEQ ID NO: 12032 - protein, 10 aa, Artificial Sequence
  Synthetic
QQYYDTPPCT

SEQ ID NO: 12033 - protein, 122 aa, Artificial Sequence
  Synthetic
EVQLVESGGGLVKPGGSLRLSCAASGFTFNSYSMNWVRQAPGKGLEWVSSISSTSSYIYYADSMKGRFTISRDNAKNSLYLQMKSLRAEDTAVYYCAKTSSSWYGSGSFDIWGQGTMVTVSS

SEQ ID NO: 12034 - protein, 15 aa, Artificial Sequence
  Synthetic
AKTSSSWYGSGSFDI

SEQ ID NO: 12035 - protein, 111 aa, Artificial Sequence
  Synthetic
QSVLTQPPSASGTPGQRVTISCSGSSSNIGSNTVNWYQQLPGTAPKLLMYSNNNQRPSGVPDRFSGSKSGTSASLAISGLQSEDEADYYCAAWDDSLNGPVFGGGTKLTVL

SEQ ID NO: 12036 - protein, 11 aa, Artificial Sequence
  Synthetic
AAWDDSLNGPV

SEQ ID NO: 12037 - protein, 124 aa, Artificial Sequence
  Synthetic
QLQLQESGPGRVKPSETLSLTCTVSGGSVSRSTYYWAWIRQPPGKGLEWIGNMYSSGSTYYNPSLKSRVTISVDTSKNQFSLSLSSVTAADTAVYYCARDLGGVRMVFGAFEIWGQGTLVTVSS

SEQ ID NO: 12038 - protein, 16 aa, Artificial Sequence
  Synthetic
ARDLGGVRMVFGAFEI

SEQ ID NO: 12039 - protein, 107 aa, Artificial Sequence
  Synthetic
DIQMTQSPSSLFASVGDRVTITCRASQSISNYLNWYQQKPGTAPRLLIYAASSLQGGVPSRFSGSGSGTEFTLTISGLQPEDFATYYCQQGDTSLETFGQGTKVEIK

SEQ ID NO: 12040 - protein, 9 aa, Artificial Sequence
  Synthetic
QQGDTSLET

SEQ ID NO: 12041 - protein, 120 aa, Artificial Sequence
  Synthetic
QVQLVQSGAEMKEPGSSVKVSCKASGGSPSSYAIGWVRQAPGPGLEWMGGIIPIFGTPNYAQKFQGRVTISADESTSTAYMELSSLRSEDTAVYYCARTVPPHMIVGHFDVWGQGTLVTV

SEQ ID NO: 12042 - protein, 15 aa, Artificial Sequence
  Synthetic
ARTVPPHMIVGHFDV

SEQ ID NO: 12043 - protein, 107 aa, Artificial Sequence
  Synthetic
DIQMTQSPSSLSASVGDRVTITCQASHDISNNLNWYQQKPGKAPKLLIYDASNLETGVPSRFSGSGSGTDFTFTISSLQPEDFATYYCQQHDNLLQCTFGPGTKVDI

SEQ ID NO: 12044 - protein, 10 aa, Artificial Sequence
  Synthetic
QQHDNLLQCT

SEQ ID NO: 12045 - protein, 122 aa, Artificial Sequence
  Synthetic
QVQLVQSGAEVEKPGSSVKVSCKASGGTFSSYSIYWVRQAPGQGLEWVGKIMPILGIADYAQQFHGRVTITAAKSTSTAYMELSGLRSEDTAVYYCARHPHHCRSTTCLDSWGQGTLVTVSS

SEQ ID NO: 12046 - protein, 15 aa, Artificial Sequence
  Synthetic
ARHPHHCRSTTCLDS

SEQ ID NO: 12047 - protein, 111 aa, Artificial Sequence
  Synthetic
QSVLTQPPSVSGAPGQRVTISCTGSNSNIGAGYDVHWYQQVPGTAPKLLIYDNSNRPSGVPDRFSGSKSGTSASLAITGLQAEDEADYYCQSYDSSLIGLLFGGGTKLTVL

SEQ ID NO: 12048 - protein, 11 aa, Artificial Sequence
  Synthetic
QSYDSSLIGLL

SEQ ID NO: 12049 - protein, 128 aa, Artificial Sequence
  Synthetic
QLQLQESGPRLVKPSETLSLTCTVSGGSITSSRYYWGWIRQPPGKGLEWIGSIHYSGSAYYNPSLKSRVTISEDTSKNQFSLKLNSVTAADTAVYYCAAENVGIVVVPAAVSGWFDPWGQGTLVTVSS

SEQ ID NO: 12050 - protein, 20 aa, Artificial Sequence
  Synthetic
AAENVGIVVVPAAVSGWFDP

SEQ ID NO: 12051 - protein, 106 aa, Artificial Sequence
  Synthetic
EIVLTQSPATLSLSPGEGATLFCGASQSVSSTYLAWYQQKPGLAPRLLIYDASRRATGIPDRFSGSGSGTDFTLTINRLEPEDFAVYYCQQYGSSPLTFGGGTKVE

SEQ ID NO: 12052 - protein, 9 aa, Artificial Sequence
  Synthetic
QQYGSSPLT

SEQ ID NO: 12053 - protein, 125 aa, Artificial Sequence
  Synthetic
EVQLVQSGAEVRKPGESLKISCKASGYSFTNYWIAWVRQMPGKGLEWMGIIYPDDYDTRYSPSFQGQVTMSVDRSINTAYLQWSSLQAADNAMYYCATPGSERDGYKYGLLPHYWGHGTLVTVSS

SEQ ID NO: 12054 - protein, 18 aa, Artificial Sequence
  Synthetic
ATPGSERDGYKYGLLPHY

SEQ ID NO: 12055 - protein, 107 aa, Artificial Sequence
  Synthetic
DIQMTQSPSTLSASVGDRVTVTCRASHSISDWLAWYQQKPGKAPKLLMYKASTLESGVPSRFSGSGSGTEFTLTISSLQPDDFATYYCQQYNIYPYTFGQGTKLEIE

SEQ ID NO: 12056 - protein, 9 aa, Artificial Sequence
  Synthetic
QQYNIYPYT

SEQ ID NO: 12057 - protein, 121 aa, Artificial Sequence
  Synthetic
EVQLVESGGGLVQPGGSLRLSCAASGFTVSTNYMSWVRQAPGKGLEWVSLIYSGGSTFYADSVKGRFTISRDNSKNTLYLQMNSLRAEDTAVYYCARDLVRAIAAHWFDPWGQGTLVTVSS

SEQ ID NO: 12058 - protein, 15 aa, Artificial Sequence
  Synthetic
ARDLVRAIAAHWFDP

SEQ ID NO: 12059 - protein, 107 aa, Artificial Sequence
  Synthetic
  misc_feature (9)..(10): Xaa can be any naturally occurring amino acid
DIQMTQSPXXLSASVGDRVTITCQASQDINKYLNWYQQKPGKAPKLLIYDASNLETGVPSRFSGSGSGTDFTFTISSLQPEDIATYYCHHYDNIPPTFGGGTKVEIK

SEQ ID NO: 12060 - protein, 9 aa, Artificial Sequence
  Synthetic
HHYDNIPPT

SEQ ID NO: 12061 - protein, 120 aa, Artificial Sequence
  Synthetic
EVQLVESGGDLVQPGGSLRLSCAASGFTFSSYAMYWVRQAPGKGLEWVSTISYTGWTTYYTNSVKGRFRISRDNSRNTMFLQMHSLRAEDTALYYCAKGGNYGDWNLDFWGQGTLVIVSS

SEQ ID NO: 12062 - protein, 13 aa, Artificial Sequence
  Synthetic
AKGGNYGDWNLDF

SEQ ID NO: 12063 - protein, 109 aa, Artificial Sequence
  Synthetic
QSVLTQPRSVSGSPGQSVTISCTGASTDIGAYDYVSWYQQHPGKAPKFMIYDVSRRPSGVPDRFSGSKSGNTASLTISGLQAEDEADYYCCSYAGTYWVFGGGTKLTVL

SEQ ID NO: 12064 - protein, 9 aa, Artificial Sequence
  Synthetic
CSYAGTYWV

SEQ ID NO: 12065 - protein, 124 aa, Artificial Sequence
  Synthetic
QVQLVQSGAEVKKPGSSVKVSCKAPGGSFSSYGISWVRQAPGQGLEWMGGIIPIFGSASYAQKFQGRVTITADKSTTTAYMELSSLRSEDTAVYYCAREYYYDSSGYYGENDYWGQGTLVTVSS

SEQ ID NO: 12066 - protein, 17 aa, Artificial Sequence
  Synthetic
AREYYYDSSGYYGENDY

SEQ ID NO: 12067 - protein, 106 aa, Artificial Sequence
  Synthetic
EIVLTQSPATLSLSPGERATLSCRASQTIGSYLAWYQQKPGQAPRLLIYDASNRATGIPARFSGSGSGTDFTLTISSLEPEDFAFYYCQQRSNFLTFGGGTKVEIK

SEQ ID NO: 12068 - protein, 8 aa, Artificial Sequence
  Synthetic
QQRSNFLT

SEQ ID NO: 12069 - protein, 129 aa, Artificial Sequence
  Synthetic
QVQLVESGGGVVQPGRSLRLSCEASGFIFSSYDMHWVRQAPGKGLEWVAVTWYDGSNKYYADSVKGRFTISRDNSKNTLYLQMNSLRAEDTAVYYCARRPRGYYDRSGFYNVEDYFDYWGQGTLVTVSS

SEQ ID NO: 12070 - protein, 22 aa, Artificial Sequence
  Synthetic
ARRPRGYYDRSGFYNVEDYFDY

SEQ ID NO: 12071 - protein, 109 aa, Artificial Sequence
  Synthetic
EIVLTQSPGTLSLSPGERATLSCRASQSVSSSYLAWYQQKPGQAPRLLIYGASSRATDIPDRFSGSGSGTDFTLTINRLEPEDFAVYYCQQYGSSPRLTFGGGTKVEIK

SEQ ID NO: 12072 - protein, 10 aa, Artificial Sequence
  Synthetic
QQYGSSPRLT

SEQ ID NO: 12073 - protein, 121 aa, Artificial Sequence
  Synthetic
EVQLVESGGGLVQPGGSLRLSCSASGFSFSSHAMHWVRQAPGKGLEYVSDISSNGDITNYADSVKGRFTISRDNSKNTLYLQMSSLRVEDTAVYYCVKDRVGPPWVLFDYWGQGTLVTVSS

SEQ ID NO: 12074 - protein, 14 aa, Artificial Sequence
  Synthetic
VKDRVGPPWVLFDY

SEQ ID NO: 12075 - protein, 107 aa, Artificial Sequence
  Synthetic
DIQMTQSPSSLSASVGDRVTITCRASQTISSYLNWYQQKPGKAPKLLIYATSSLQSGVPSRFSGSGSGTDFTLTISSLQPEDFATYYCQQSYSTPYTFGQGTKLEIK

SEQ ID NO: 12076 - protein, 9 aa, Artificial Sequence
  Synthetic
QQSYSTPYT

SEQ ID NO: 12077 - protein, 122 aa, Artificial Sequence
  Synthetic
EVQLVESGGGLVQPGGSLRLSCAASGFTFSSYWMSWVRQAPGKGLEWVANIKEDGSEKDYVDSVKDRFIISRDNAKNSVYLQVDSLRAEDTAVYYCARGKYRRGGEYFFDYWGQGTLVTVSS

SEQ ID NO: 12078 - protein, 15 aa, Artificial Sequence
  Synthetic
ARGKYRRGGEYFFDY

SEQ ID NO: 12079 - protein, 106 aa, Artificial Sequence
  Synthetic
SYVLTQPPSVSVSPGQTARITCSAAAFPNLYAYWYQQKPGQAPVVVIYRDTERPSGIPERFSGSSSGTTVTLTISGVQAEDEADYYCQSADSSGVVFGGGTKLTVL

SEQ ID NO: 12080 - protein, 9 aa, Artificial Sequence
  Synthetic
QSADSSGVV

SEQ ID NO: 12081 - protein, 119 aa, Artificial Sequence
  Synthetic
QLQLQESGPGLVKPSETLSLTCTVSGVYISSSTSYWGWIRQPPGKGLEWIGSVYYAGSTYSNPSLKSRVTLSVDTSKSQFSLKLSSVTAADTAVYYCARHPPAWEFDYWGQGILVTVSS

SEQ ID NO: 12082 - protein, 11 aa, Artificial Sequence
  Synthetic
ARHPPAWEFDY

SEQ ID NO: 12083 - protein, 112 aa, Artificial Sequence
  Synthetic
DVVMTQSPLSLPVTLGQPASISCRSSQSLVYSDGNTHLSWFQQRPGQSPRRLIYQVSNRDSGVPDRFSGSGSGTDFTLKISRVEAEDVGVYYCMQGTHWPPAFGPGTKVDIK

SEQ ID NO: 12084 - protein, 9 aa, Artificial Sequence
  Synthetic
MQGTHWPPA

SEQ ID NO: 12085 - protein, 121 aa, Artificial Sequence
  Synthetic
QVQLQESGPGLVKPSQTLSLTCTVSGGSISSGGYYWSWIRQHPDKGLEWIGYIYYSGSTYYNPSLKSRVTISVDTSKNQFSLKLSSVTAADTAVYYCAREGTGGLALFQHWGQGTLVTVSS

SEQ ID NO: 12086 - protein, 13 aa, Artificial Sequence
  Synthetic
AREGTGGLALFQH

SEQ ID NO: 12087 - protein, 107 aa, Artificial Sequence
  Synthetic
DIQMTQSPSSLSASVGDRVTITCQASQDISNYLNWYQQKPGKAPKLLIYSASYLETGVPSRFSGSGSGTDFTFTISSLQPEDIATYYCQQYENLPWTFGQGTKVEIK

SEQ ID NO: 12088 - protein, 9 aa, Artificial Sequence
  Synthetic
QQYENLPWT

SEQ ID NO: 12089 - protein, 117 aa, Artificial Sequence
  Synthetic
EVQLVESGGGLIQPGGSLRLSCAASGLTVSSNYMSWVRQAPGKGLEWVSVIYSGGSTFHADFVKGRFTISRDNSKNTLYLQMNSLRAEDTAVYYCARDMYEGAFDIWGQGTMVTVSS

SEQ ID NO: 12090 - protein, 11 aa, Artificial Sequence
  Synthetic
ARDMYEGAFDI

SEQ ID NO: 12091 - protein, 108 aa, Artificial Sequence
  Synthetic
DIQLTQSPSFLSASAGDRVTITCRASQGISSFLAWYQQKPGKAPKLLIYAASTLQSGVPSRFSGSGSGTEFTLTISSLQPEDFATYYCQQLNSYPRLTFGGGTKVEIK

SEQ ID NO: 12092 - protein, 10 aa, Artificial Sequence
  Synthetic
QQLNSYPRLT

SEQ ID NO: 12093 - protein, 131 aa, Artificial Sequence
  Synthetic
QVQLVQSGAEVKRPGSSVKVSCKASGGTFTNHAFSWVRQAPGQGLEWVGRLIPFMDIANYAQKFQGRVTITADKSTNTVFMTLSSLRYEDSAVYYCARESIPPGSVIVPAAPSYYYCMDVWGKGTTVTVSS

SEQ ID NO: 12094 - protein, 24 aa, Artificial Sequence
  Synthetic
ARESIPPGSVIVPAAPSYYYCMDV

SEQ ID NO: 12095 - protein, 107 aa, Artificial Sequence
  Synthetic
DIQMTQSPSSLSASVGDRVTITCRASQSISTFLNWYQQKPGKAPELLIYAASSLQSGVPSRFSGSGSGTDFTLTISSLQPEDFATYYCQQSYDTLWTFGQGTKVEIK

SEQ ID NO: 12096 - protein, 9 aa, Artificial Sequence
  Synthetic
QQSYDTLWT

SEQ ID NO: 12097 - protein, 129 aa, Artificial Sequence
  Synthetic
QVQLVQSGSELKKPGASVKVSCKASGYTFTSFAINWVRQAPGQGLDWMGWINTNTGTPTYAQGFTGRFVFSLDTSVSTAYLQISGLKAEDTAVYYCATNAGGEKSDWMGYDFRPGWFDPWGQGTLVTVS

SEQ ID NO: 12098 - protein, 23 aa, Artificial Sequence
  Synthetic
ATNAGGEKSDWMGYDFRPGWFDP

SEQ ID NO: 12099 - protein, 110 aa, Artificial Sequence
  Synthetic
QSVLTQPASMSGSPGQAITISCTGTSNDVGGYNYVSWYQQHPGKAPKLMIYDVSNRPSGVSNRFSGSKSGHTASLTISGLQAEDEADYFCSSYTSSGTLLFGGGTKLTVL

SEQ ID NO: 12100 - protein, 10 aa, Artificial Sequence
  Synthetic
SSYTSSGTLL

SEQ ID NO: 12101 - protein, 125 aa, Artificial Sequence
  Synthetic
EVQLVESGGGLVQPGGSLRLACAASGFTFSSYSMNWVRQAPGKGLEWVSYISSRSSTIYYADSVKGRFSISRDNAKNSLYLQMNSLRAEDTAVYYCASGSRYRSSSAYYYYMDVWGKGTTVTVSS

SEQ ID NO: 12102 - protein, 18 aa, Artificial Sequence
  Synthetic
ASGSRYRSSSAYYYYMDV

SEQ ID NO: 12103 - protein, 109 aa, Artificial Sequence
  Synthetic
QSVLTQPASVSGSPGQSITISCTGTSSDVGSYNLVSWYQQHPGKAPKLMIYEVNLRPAGVSIRFSGSKSGNTASLTISGLQAEDEADYYCCSYVGNNTLFGGGTKLTVL

SEQ ID NO: 12104 - protein, 9 aa, Artificial Sequence
  Synthetic
CSYVGNNTL

SEQ ID NO: 12105 - protein, 123 aa, Artificial Sequence
  Synthetic
QMQLVQSGPEVKKPGTSVKVSCKASGFTFDISAIQWVRQARGQRLEWIGWIGVGRGNTDYAQNFQQRVTITRDMSTNTAYMELSSLRSGDTAVYYCAAPFCNRTTCSDGFDVWGLGTVVTVSS

SEQ ID NO: 12106 - protein, 16 aa, Artificial Sequence
  Synthetic
AAPFCNRTTCSDGFDV

SEQ ID NO: 12107 - protein, 108 aa, Artificial Sequence
  Synthetic
EIVLTQSPGTLSLSPGERATLSCRASQNVRSTYFAWYQVKVGQAPRVLIYGASSRATGIPDRFSGRGSGTDFTLSIRRVEPEDVAVYYCQQYGTSPWTFGQGTKVEIK

SEQ ID NO: 12108 - protein, 9 aa, Artificial Sequence
  Synthetic
QQYGTSPWT

SEQ ID NO: 12109 - protein, 126 aa, Artificial Sequence
  Synthetic
QVQLQESGPGLVKPSETLSLTCSVSGGSVYSGSYYWSWIRQPPRKGLEWIGYIYYSGTTNYNPSLKSRVTISVDTSNDHFSLTLNSVTAADTAVYYCARSSFRRGYTYDTYYFDYWGQGLLVTVSS

SEQ ID NO: 12110 - protein, 18 aa, Artificial Sequence
  Synthetic
ARSSFRRGYTYDTYYFDY

SEQ ID NO: 12111 - protein, 111 aa, Artificial Sequence
  Synthetic
QSVLTQPPSVSAAPGQKVTISCSGSSSNIGNNYVSWYQQFPGTAPKLLIYDNNKRPSGIPDRFSGSKSGTSATLGITGLQTGDEADYYCGTWDSSLSVPWVFGGGTKLTVL

SEQ ID NO: 12112 - protein, 12 aa, Artificial Sequence
  Synthetic
GTWDSSLSVPWV

SEQ ID NO: 12113 - protein, 122 aa, Artificial Sequence
  Synthetic
EVQLLESGGGLIQPGGSLRLSCAASGFTFSSHAMSWVRRAPGKGLEWVSGTSGSGDNTFYADSVKGRFTISRDNSKNTVYLQMNSLRAEDTAVYFCAKDLVTNPSYEAFDMWGQGTMVTVSS

SEQ ID NO: 12114 - protein, 15 aa, Artificial Sequence
  Synthetic
AKDLVTNPSYEAFDM

SEQ ID NO: 12115 - protein, 109 aa, Artificial Sequence
  Synthetic
SYVLTQPPSVSVAPGKTARITCGGNDIGSKSVHWYQQKPGQAPVLVIYYDSDRPSGIPERFSGSNSGNTATLTISRVEAGDEADYSCQVWDGTSDHPVVFGGGTKLTVL

SEQ ID NO: 12116 - protein, 12 aa, Artificial Sequence
  Synthetic
QVWDGTSDHPVV

SEQ ID NO: 12117 - protein, 119 aa, Artificial Sequence
  Synthetic
EVQLVQSGAEVKKPGESLKISCKASGYSFTSYWIGWVRQMPGKGLEWMGIIYPGDSDTRYSPSFQGQVTISADRSISTAYLQWSSLKASDTAMYYCARRPTLNNWFDSWGQVTQVTVSS

SEQ ID NO: 12118 - protein, 12 aa, Artificial Sequence
  Synthetic
ARRPTLNNWFDS

SEQ ID NO: 12119 - protein, 110 aa, Artificial Sequence
  Synthetic
QSVLTQPPSASGTPGQRVTISCSGSSSNIGSNPVNWYLQLPGAAPKTLIYNNNQRPSGVPDRFSGSKSGTSASLAISGLQSEDEADYYCEAWDDSLNVVVFGGGTKLTVL

SEQ ID NO: 12120 - protein, 11 aa, Artificial Sequence
  Synthetic
EAWDDSLNVVV

SEQ ID NO: 12121 - protein, 122 aa, Artificial Sequence
  Synthetic
QVQLVESGGGVVQPGRSLRLSCAASGFTFSSSTMHWVRQAPGKGLEWVAVISYDGSNEYYADSVKGRFTISRDNSKNTLYLQMNSLRTEDTAVYFCAREWGYLGYERTPFDYWGQGTQLTVS

SEQ ID NO: 12122 - protein, 16 aa, Artificial Sequence
  Synthetic
AREWGYLGYERTPFDY

SEQ ID NO: 12123 - protein, 107 aa, Artificial Sequence
  Synthetic
DIQMTQSPSTLSASVGDRVTITCRASQGISRWLAWYQQKPGKAPKLLIYKASSLESGVPSRFSGSGSGTEFTLTISSLQPEDFAAYYCQRYNNYSEYTFGQGTKLEI

SEQ ID NO: 12124 - protein, 10 aa, Artificial Sequence
  Synthetic
QRYNNYSEYT

SEQ ID NO: 12125 - protein, 118 aa, Artificial Sequence
  Synthetic
EVQLVESGGGLVQPGGSLRLSCAASGFTVSSYYMSWVRQAPGKGLEWVSVIYSGGSTYYADSVKGRFTFSRDNSKNTLYLQMNSLRAEDTAVYYCATYPPFYGDLDYWGHGTLVTVSS

SEQ ID NO: 12126 - protein, 12 aa, Artificial Sequence
  Synthetic
ATYPPFYGDLDY

SEQ ID NO: 12127 - protein, 108 aa, Artificial Sequence
  Synthetic
QSVLTQPPSASGSPGQSVTISCTGTSSDVGGYNYVSWYQQHPGKAPKLMIYEVSKRPSGVPDRFSGSKSGNTASLTVSGLQAVDEADYYCSSYADNWVFGGGTKLTVL

SEQ ID NO: 12128 - protein, 8 aa, Artificial Sequence
  Synthetic
SSYADNWV

SEQ ID NO: 12129 - protein, 123 aa, Artificial Sequence
  Synthetic
QLQLQESGPGLVKPSETLSLTCTVSGGSISSNNFYWGWIRQPPGKGLEWIGSISFGGSSYYNPSLKSRGTISVDTSKNQFSLKLRSVTAADTAVYYCARGIIDFADDNWFDPWGQGTLVTVSS

SEQ ID NO: 12130 - protein, 15 aa, Artificial Sequence
  Synthetic
ARGIIDFADDNWFDP

SEQ ID NO: 12131 - protein, 106 aa, Artificial Sequence
  Synthetic
SYVLTQPPSVSVSPGQTARITCSGEALPKENVYWYQQKAGQAPVVVIYKDSERPSGIPERFSGSNSAITATLTISGVQAEDEADYYCQSADSSGVVFGGGTKLTVL

SEQ ID NO: 12132 - protein, 9 aa, Artificial Sequence
  Synthetic
QSADSSGVV

SEQ ID NO: 12133 - protein, 122 aa, Artificial Sequence
  Synthetic
QVQLVESGGGVVQPGRSLRLSCAASGFTFSSYAMHWVRQAPGKGLEWVAVISDDGSDKYYADSVKGRFTISRDNSKNTLHLQMNSLRTEDTAMYYCARRDNSLWFGEYFDYWGQGTLVTVSS

SEQ ID NO: 12134 - protein, 15 aa, Artificial Sequence
  Synthetic
ARRDNSLWFGEYFDY

SEQ ID NO: 12135 - protein, 108 aa, Artificial Sequence
  Synthetic
DIQMTQSPSSLSASVGDRVTIPCRASQSISTYLNWYQQKPGKAPKLLIYAASSLQSGVPSRFSGSGSGTDFTLTISSLQPEDFATYYCQQSYSNPPLTFGGGTKVEIK

SEQ ID NO: 12136 - protein, 10 aa, Artificial Sequence
  Synthetic
QQSYSNPPLT

SEQ ID NO: 12137 - protein, 126 aa, Artificial Sequence
  Synthetic
QVQLQESGPGLVKPSETLSLTCTVSGGSVSSGSYYWSWIRQPPGKGLEWIGYIYYSGSTNYNPSLKSRVTISVDTSKNQFSLELSSMTAADTAVYYCARSSFRLRYSYDTYYFDYWGQGTLVTVSS

SEQ ID NO: 12138 - protein, 18 aa, Artificial Sequence
  Synthetic
ARSSFRLRYSYDTYYFDY

SEQ ID NO: 12139 - protein, 111 aa, Artificial Sequence
  Synthetic
QSVLTQPPSVSAAPGQKVTISCSGSTSNIGNNYVSWYQQLPGTAPKLLIYDNNKRPSGIPDRFSGSKSGTSATLGITGLQTGDEADYYCGTWDSSLSVPWVFGGGTKLTVL

SEQ ID NO: 12140 - protein, 12 aa, Artificial Sequence
  Synthetic
GTWDSSLSVPWV

SEQ ID NO: 12141 - protein, 113 aa, Artificial Sequence
  Synthetic
QVQLVQSGAEVKKPGSSVKVSCKASGPTFSTFPISWVRQAPGQGLEWMGGIIPLRGAATYAQKFQDRVTISADESTKTAYMELASLTSEDTAVFYCVGFGVYWGQGTLVTVSS

SEQ ID NO: 12142 - protein, 6 aa, Artificial Sequence
  Synthetic
VGFGVY

SEQ ID NO: 12143 - protein, 107 aa, Artificial Sequence
  Synthetic
EIVLTQSPGTLPLSPGERATLSCRAGQSVSNNYLAWYQQRPGQAPRLLIYDASSRATGIPDRFSGSGSGTDFTLTISRLEPEDFAVYYCQQYGRSLTFGGGTKVEIK

SEQ ID NO: 12144 - protein, 8 aa, Artificial Sequence
  Synthetic
QQYGRSLT

SEQ ID NO: 12145 - protein, 121 aa, Artificial Sequence
  Synthetic
EVQLLESGGGLIQPGGSLRLSCTASGFTFSSYVMSWVRQAPGKGLEWVSNISGGGDSTYYADSVKGRFTVSRDNSKNTLYLQMNSLRADDTAVYYCAKDKGSVWWELLDFWGQGTLVTVSS

SEQ ID NO: 12146 - protein, 14 aa, Artificial Sequence
  Synthetic
AKDKGSVWWELLDF

SEQ ID NO: 12147 - protein, 107 aa, Artificial Sequence
  Synthetic
DIQMTQSPSSLYASVGDRVSITCRASQSLNSYLNWYQQKPGNAPKLLIYAVSNLQSGVPSRFSGSGSGTDFTLTISRLQPEDFATYYCQQSYTTPPTFGQGTKVEIK

SEQ ID NO: 12148 - protein, 9 aa, Artificial Sequence
  Synthetic
QQSYTTPPT

SEQ ID NO: 12149 - protein, 119 aa, Artificial Sequence
  Synthetic
QVQLVQSGAEVKKPGASVKVSCKASGYSFTSFYIHWVRQAPGQGLEWMGIIDPRGGSTSYAQRFQGRVALTRDTSTSTVSIELSSLTSEDTAVYYCARFYDSTGSIDYWGQGTLVTVSS

SEQ ID NO: 12150 - protein, 12 aa, Artificial Sequence
  Synthetic
ARFYDSTGSIDY

SEQ ID NO: 12151 - protein, 108 aa, Artificial Sequence
  Synthetic
DIQMTQSPSSLSASVGDRVTITCRASQGIRNDLGWYQQKPGKAPKRLIYGASSLESGVPSRFSGSGSGTEFTLTISSLQPEDFATYYCLQHNSYPWLSFGGGTKVEIK

SEQ ID NO: 12152 - protein, 10 aa, Artificial Sequence
  Synthetic
LQHNSYPWLS

SEQ ID NO: 12153 - protein, 125 aa, Artificial Sequence
  Synthetic
QLQLQESGPGLVKPSETLSLTCTVSGGSISSSSYYWGWIRQPPGKGLDWIASIFYSGITYSNPSLKSRVTISVDTSKNQFSLKLTSVTAADTAVYYCARVVRSCISNTCYEVDYWGQGTLVTVSS

SEQ ID NO: 12154 - protein, 17 aa, Artificial Sequence
  Synthetic
ARVVRSCISNTCYEVDY

SEQ ID NO: 12155 - protein, 110 aa, Artificial Sequence
  Synthetic
QSVLTQPASVSGSRGQSITISCTGTSSDIGSYNFVSWYQQHPGKAPKLILYEGNKRPSGVSDRFSGSKSGNTASLTISGLQAEDEADYHCCSYVGSGTLIFGGGTKLTVL

SEQ ID NO: 12156 - protein, 10 aa, Artificial Sequence
  Synthetic
CSYVGSGTLI

SEQ ID NO: 12157 - protein, 117 aa, Artificial Sequence
  Synthetic
EVQLVESGGGLIQPGGSLRLSCAASGLTVSSNYMSWVRQAPGKGLEWVSVIFPGGSTFYADSVKGRFTISRDNSKNTLYLQMNSLRVEDTAVYYCARDMYEGAFDIWGQGTMVTVSS

SEQ ID NO: 12158 - protein, 11 aa, Artificial Sequence
  Synthetic
ARDMYEGAFDI

SEQ ID NO: 12159 - protein, 108 aa, Artificial Sequence
  Synthetic
DIQLTQSPSFLSAAVGDRVTITCRASQGISSYLAWYQQKLGKAPKLLIYAASTLQSGVPSRFSGSGSGTEFTLTISSLQPEDVATYYCQQLNSYPRLTFGGGTKVEIK

SEQ ID NO: 12160 - protein, 10 aa, Artificial Sequence
  Synthetic
QQLNSYPRLT

SEQ ID NO: 12161 - protein, 128 aa, Artificial Sequence
  Synthetic
QVQLQESGPGLVKPSETLSLTCTVSGGSINIANYYWNWIRQPPGKALEWIGCIYYSGTTYYNPSLRSRLTISVDTSKNQFSLELTSVTAADTAVYYCAREPSGYYDSSGYYHHAFDIWGQGTMVAVSS

SEQ ID NO: 12162 - protein, 20 aa, Artificial Sequence
  Synthetic
AREPSGYYDSSGYYHHAFDI

SEQ ID NO: 12163 - protein, 110 aa, Artificial Sequence
  Synthetic
QSVLTQPASVSGSPGQSITISCTGTSSDVGSYNLVSWYQQHPGKAPKLMIYEGSKRPSGVSNRFSGSKSGNTASLTISGLQAEDEADYYCCSYAGSTIRVFGGGTKLTVL

SEQ ID NO: 12164 - protein, 10 aa, Artificial Sequence
  Synthetic
CSYAGSTIRV

SEQ ID NO: 12165 - protein, 125 aa, Artificial Sequence
  Synthetic
QVQLVESGGGVVQSGRSLRLSCAASGFTFSSYVMHWVRQAPGKGLEWVAVIWNDGSNKYYADSVKGRFTISRDNSNNTLYLQMNSLRAEDTAVYYCATERYYYGSGSYYNPFDHWGQGTLVTVSS

SEQ ID NO: 12166 - protein, 18 aa, Artificial Sequence
  Synthetic
ATERYYYGSGSYYNPFDH

SEQ ID NO: 12167 - protein, 108 aa, Artificial Sequence
  Synthetic
SYVLTQPPSVSVAPGKTARITCGGNNIGSKSVHWYQQKPGQAPVLVMYYDSDRPSGIPERISGSKSGSTATLTISRVEAGDEADYYCQVWDSSSDPVVFGGGTQLTVL

SEQ ID NO: 12168 - protein, 11 aa, Artificial Sequence
  Synthetic
QVWDSSSDPVV

SEQ ID NO: 12169 - protein, 127 aa, Artificial Sequence
  Synthetic
QVQLQESGPGLVKPSQTLSLTCTVSGGSITSGGYYWSWIRHLPGKGLEWIGYIHYSGSTYYSPSLKSRVTISVDTSTNQFSLRLSSVTAADTAVYYCARTLYYDSSGDYFQYYFDYWGQGTLVTVSS

SEQ ID NO: 12170 - protein, 19 aa, Artificial Sequence
  Synthetic
ARTLYYDSSGDYFQYYFDY

SEQ ID NO: 12171 - protein, 108 aa, Artificial Sequence
  Synthetic
  misc_feature (9)..(10): Xaa can be any naturally occurring amino acid
EIVLTQSPXXLSLSPGERATLSCRASHSVSSNYLAWYQQKPGQAPRLVISGASSRATGIPDRFSGSGSGTDFTLTISRLEPEDFAVYYCQQYGSSPITFGQGTRLEIK

SEQ ID NO: 12172 - protein, 9 aa, Artificial Sequence
  Synthetic
QQYGSSPIT

SEQ ID NO: 12173 - protein, 120 aa, Artificial Sequence
  Synthetic
EVQLVESGGGLIAPGGSLRLSCAASGFTVVRNYMTWVRQAPGKGLEWVSIIYSGGSTFYADSVRGRFTISRDNSNNTLYLQMNSLRVEDTAVYYCARFGLLGSWFGPDYWGQGTLVTVSS

SEQ ID NO: 12174 - protein, 14 aa, Artificial Sequence
  Synthetic
ARFGLLGSWFGPDY

SEQ ID NO: 12175 - protein, 107 aa, Artificial Sequence
  Synthetic
EIVLTQSPGTLSLSPGERATLSCRASQGFSSSYLAWYQQKPGQAPRLLIYGASSRATGIPDRFSGSGSGTDFTLTITRLEPEDFAVYYCQQFGDSLVFGGGTKVEIK

SEQ ID NO: 12176 - protein, 8 aa, Artificial Sequence
  Synthetic
QQFGDSLV

SEQ ID NO: 12177 - protein, 125 aa, Artificial Sequence
  Synthetic
EVQLLESGGGLVQPGGSLRLSCAASGLPFRSYAMSWVRQAPGKGLEWVSVISGSGGSTYYADSVKGRFTISRDNSKNTLYLQMNSLRAEDTAVYYCAKVPYLTLVRGVNDVFDIWGQGTMLTVSS

SEQ ID NO: 12178 - protein, 18 aa, Artificial Sequence
  Synthetic
AKVPYLTLVRGVNDVFDI

SEQ ID NO: 12179 - protein, 107 aa, Artificial Sequence
  Synthetic
DIQMTQSPSSLSASVGDRVTITCRASQGIRNDLGWYQQKPGKAPKRLIYAASSLQSGVPSRFSGSGSGTEFTLTISSLQPEDFATYYCLQHNSYPWTFGQGTKVEIK

SEQ ID NO: 12180 - protein, 9 aa, Artificial Sequence
  Synthetic
LQHNSYPWT

SEQ ID NO: 12181 - protein, 125 aa, Artificial Sequence
  Synthetic
QLQLQESGPGLVKPSETLSLTCTVSGGSISSSSYYWGWIRQPPGKGLEWIGNIYYTGTTYYNPSLKSRLTISVDTSKNQFSLRLSSVTAADTAVFFCARFHRFYSNSLTAAFDSWGQGTLVTVSS

SEQ ID NO: 12182 - protein, 17 aa, Artificial Sequence
  Synthetic
ARFHRFYSNSLTAAFDS

SEQ ID NO: 12183 - protein, 109 aa, Artificial Sequence
  Synthetic
QSVLTQPPSASGSPGQSVTISCTGTSSDVGGYDYVSWYQQHPGKAPKLMIYEVTKRPSGVPDRFSGSKSGNTASLTVSGLQAEDEADYYCSSYVGTSYVFGTGTKVTVL

SEQ ID NO: 12184 - protein, 9 aa, Artificial Sequence
  Synthetic
SSYVGTSYV

SEQ ID NO: 12185 - protein, 125 aa, Artificial Sequence
  Synthetic
EVQLVESGGALVKPGGSLRLSCAASGFTLTKAWMNWVRQAPGKGLEWVGRIKSKSDGGTTDYATPVKGRFTISRDDLKNMVYLQLNSLKTEDTGLYYCTTPYDILTGYFWGFDPWGQGTLVTVSS

SEQ ID NO: 12186 - protein, 16 aa, Artificial Sequence
  Synthetic
TTPYDILTGYFWGFDP

SEQ ID NO: 12187 - protein, 108 aa, Artificial Sequence
  Synthetic
SYVLTQAPSVSVAPGKTATITCDGNNIGSKSVQWYQQKPDQAPVLVVFDDDDRPSGIPERFSGSNSGDTATLTISRVEAGDEAVFHCQVWDSESAHVVFGGGTKLTVL

SEQ ID NO: 12188 - protein, 11 aa, Artificial Sequence
  Synthetic
QVWDSESAHVV

SEQ ID NO: 12189 - protein, 122 aa, Artificial Sequence
  Synthetic
QVQLVESGGGLVKPGGSLRLSCAASGFTFSDYYMNWIRQAPGKGLEWVAYISTTSGYTNYADSVKGRFTISRDNAKNSLYLQMKSLRAEDTAVYYCATGLTYNYDTSGYYYWGQGTLVTVSS

SEQ ID NO: 12190 - protein, 15 aa, Artificial Sequence
  Synthetic
ATGLTYNYDTSGYYY

SEQ ID NO: 12191 - protein, 110 aa, Artificial Sequence
  Synthetic
QSVLTQPPSASGSPGQSVTISCTGTSSDIGGYNYVSWYQQHPGNAPKLIIYEVTKRPSGVADRFSGSKSGNTASLTVSGLQAEDEADYHCSSFAGSNNFVVFGGGTKLTV

SEQ ID NO: 12192 - protein, 11 aa, Artificial Sequence
  Synthetic
SSFAGSNNFVV

SEQ ID NO: 12193 - protein, 122 aa, Artificial Sequence
  Synthetic
EVQLVESGGGLVQPGGSLRLSCLASGFTFSSFDMHWVRQAPGKGLEYVSAISSDGGSTYYADSMKGRFLISRDNSKNTLSLQMSSLRAEDTAVYYCVKDRAAMQSPVVLLDHWGQGTLVTVS

SEQ ID NO: 12194 - protein, 16 aa, Artificial Sequence
  Synthetic
VKDRAAMQSPVVLLDH

SEQ ID NO: 12195 - protein, 105 aa, Artificial Sequence
  Synthetic
DIQMTQSPSSLSASVGDRVTITCRASQSISSYLSWFQQIPGRAPKLLIYSASTLQSGVPSRFSGSGSGTDFTLTISGLQPKDFATYYCQQSYTTPTFGGGTKVEI

SEQ ID NO: 12196 - protein, 8 aa, Artificial Sequence
  Synthetic
QQSYTTPT

SEQ ID NO: 12197 - protein, 116 aa, Artificial Sequence
  Synthetic
EVQLVESGGGLVQPGGSLRLSCAASGIIVSRNYMTWVRQAPGKGLEWISFIYSGGSTFYADSVKGRFTISRDNSQNTLYLQMSSLRVEDTAVYFCARTYGDSRGDYWGPGTLVTVS

SEQ ID NO: 12198 - protein, 11 aa, Artificial Sequence
  Synthetic
ARTYGDSRGDY

SEQ ID NO: 12199 - protein, 108 aa, Artificial Sequence
  Synthetic
DIQMTQSPSSLSAYVGDRVTITCQASQDISNSLNWYQQKPGKAPKLLIYDASNLETGVPSRFGGSGSGTDFTFTISSLQPEDIATYYCQHYDNLPQWTFGQGTKVEIK

SEQ ID NO: 12200 - protein, 10 aa, Artificial Sequence
  Synthetic
QHYDNLPQWT

SEQ ID NO: 12201 - protein, 121 aa, Artificial Sequence
  Synthetic
QVQLQESGPGLVKPSQTLSLTCTVSGASISSPNYYWSWIRQHPGKGLEWIGYIFYSGITYYSSSLKSRVTISVDTSKNQFSLNLTSMTAADTAVYYCARVARYQLLPFDYWGQGTLVTVSS

SEQ ID NO: 12202 - protein, 13 aa, Artificial Sequence
  Synthetic
ARVARYQLLPFDY

SEQ ID NO: 12203 - protein, 110 aa, Artificial Sequence
  Synthetic
QSVLTQPPSASGSPGQSITISCTGTSSDVGSYNYVSWYQQHPGKAPKLMIYEVSKRPSGVPDRFSGSKSGNTASLTVSGLQAEDEADYYCSSYAGSNNPVFGGGTKLTVL

SEQ ID NO: 12204 - protein, 10 aa, Artificial Sequence
  Synthetic
SSYAGSNNPV

SEQ ID NO: 12205 - protein, 116 aa, Artificial Sequence
  Synthetic
EVQLVESGGGLIQSGGSVRLSCAASEIIVSSNYMSWVRQAPGKGLEWVSVIYAGGSTFYADSVKGRFTISRDNSKNTLYLQMNNLRAEDTAVYYCARDLGGPIDYWGQGTLVTVSS

SEQ ID NO: 12206 - protein, 10 aa, Artificial Sequence
  Synthetic
ARDLGGPIDY

SEQ ID NO: 12207 - protein, 108 aa, Artificial Sequence
  Synthetic
EIVLTQSPGTLSLSPGERATLSCRASQSVSSTYLAWYQQKPGQAPRLLIYGASSRATGIPDRFSGSGSGTDFTLTISRLEPEDFAVYYCQQYGSSPGTFGQGTKVEIK

SEQ ID NO: 12208 - protein, 9 aa, Artificial Sequence
  Synthetic
QQYGSSPGT

SEQ ID NO: 12209 - protein, 126 aa, Artificial Sequence
  Synthetic
QVQLQQWGAGLLKPSETLSLICAVSGGSFSGYYWSWIRQPPGKGLEWIGQINHSGSTNYNPSLKSRVTISVDTSKNQFSLNVTSVTAADTAVYYCARVPRHCSSSRCYEVEYFDNWGQGTLVTVSA

SEQ ID NO: 12210 - protein, 20 aa, Artificial Sequence
  Synthetic
ARVPRHCSSSRCYEVEYFDN

SEQ ID NO: 12211 - protein, 110 aa, Artificial Sequence
  Synthetic
SYVLTQPPSVSVAPGKTARITCGGDSIGSKNVHWYQQKPGQAPVLVIFDDSDRPSGIPERFSASNSGNTATLTISRVEAGDEADYYCQVWDSTSGPPVYVFGPGTKVTVL

SEQ ID NO: 12212 - protein, 13 aa, Artificial Sequence
  Synthetic
QVWDSTSGPPVYV

SEQ ID NO: 12213 - protein, 121 aa, Artificial Sequence
  Synthetic
QVQLQESGPGLVKPSQTLSLTCTVSGGSISSGSYYWSWVRQHPGKGLEWIGYIYHSGITYYNPSLKSRVTISVDTSKNQFSLRLSSVTAADTAVYYCARVARYQLLPFDYWGQGTLVTVSS

SEQ ID NO: 12214 - protein, 13 aa, Artificial Sequence
  Synthetic
ARVARYQLLPFDY

SEQ ID NO: 12215 - protein, 110 aa, Artificial Sequence
  Synthetic
QSVLTQPPSASGSPGQSVTISCTGTSSDIGGYDYVSWYQQLPGKAPKLMIYEVSKRPSGVPDRFSGSKSGNTASLTVSGLQAEDEADYYCSSYAGSNNPVFGGGTKLTVL

SEQ ID NO: 12216 - protein, 10 aa, Artificial Sequence
  Synthetic
SSYAGSNNPV

SEQ ID NO: 12217 - protein, 122 aa, Artificial Sequence
  Synthetic
QVQLVQSGAEVKKPGASVRVSCKASRHTFTNYYMHWVRQAPGQGLEWMGIINPSGGSTTYAQKFQGRVTMTSDTSTSTVYMELTSLRFEDTAVYYCARAGWVPAATWYLDPWGQGTLVTVSS

SEQ ID NO: 12218 - protein, 15 aa, Artificial Sequence
  Synthetic
ARAGWVPAATWYLDP

SEQ ID NO: 12219 - protein, 106 aa, Artificial Sequence
  Synthetic
DIQMTQSPSTLSASVGDRVTITCRASQSISSWLAWYQQKPGKAPKVLIYKASTLESGVPSRFSGSGSGTEFTLTISSLQPDDFATYYCQQYNSPWTFGQGTKVEIK

SEQ ID NO: 12220 - protein, 8 aa, Artificial Sequence
  Synthetic
QQYNSPWT

SEQ ID NO: 12221 - protein, 121 aa, Artificial Sequence
  Synthetic
QVQLQESGPGLVKPSQTLSLTCTVSGGSISTYGYYWTWIRQHPGKGLEWIGHVYYSGSTYYNPSLKSRVTISVDTSKNQFSLNLNSVTAADTAVYYCAREMTGGLALFQHWGQGTLVTVSS

SEQ ID NO: 12222 - protein, 13 aa, Artificial Sequence
  Synthetic
AREMTGGLALFQH

SEQ ID NO: 12223 - protein, 107 aa, Artificial Sequence
  Synthetic
DIQMTQSPSSLSASVGDRVTITCQASQDISDYLNWYQQRPGKAPNLLIYSASKLETGVSSRFGGSGSGTHFTFTISSLQPEDIATYYCQQYDNLPWTFGQGTTVEIK

SEQ ID NO: 12224 - protein, 9 aa, Artificial Sequence
  Synthetic
QQYDNLPWT

SEQ ID NO: 12225 - protein, 121 aa, Artificial Sequence
  Synthetic
QVQLVQSGSELRKPGASVKVSCRASGYTFSTYTMNWVRQAPGQGLEWMGWINTNTGNPTYAQGFTGRFVFSLDTSVNTAYLQISSLKSEDTAVYYCARYLIALVPAAFDYWGQGTLVTVSS

SEQ ID NO: 12226 - protein, 14 aa, Artificial Sequence
  Synthetic
ARYLIALVPAAFDY

SEQ ID NO: 12227 - protein, 107 aa, Artificial Sequence
  Synthetic
DIQMTQSPSSLSASVGDRVTITCRATQSIRGYLNWYQKKPGKAPKLLIYAASTLQSGVPSRFSGSGSGTDFTLTITSLQPEDFATYYCQQSDITPPTFGQGTKVEIK

SEQ ID NO: 12228 - protein, 9 aa, Artificial Sequence
  Synthetic
QQSDITPPT

SEQ ID NO: 12229 - protein, 125 aa, Artificial Sequence
  Synthetic
QLQLQESGPGLVKPSETLSLTCTVSGDSISSSSYYWGWIRQPPGKGLEWIGNIFYSGITYDNPSLKSRVTISVDTSKNQFSLKLSSVSAADTAVYYCARHVRSCSSTRCYTFDYWGQGTLVTVSS

SEQ ID NO: 12230 - protein, 17 aa, Artificial Sequence
  Synthetic
ARHVRSCSSTRCYTFDY

SEQ ID NO: 12231 - protein, 108 aa, Artificial Sequence
  Synthetic
QSVLTQPPSASGSPGQSVTISCTGTSSDVGGYNYVSWYQQHPGKAPKLIIYEVTKRPSGVPDRFSGSKSGNTASLTVSGLQAEDEADYYCSSYVGGTLFGTGTKVTVL

SEQ ID NO: 12232 - protein, 8 aa, Artificial Sequence
  Synthetic
SSYVGGTL

SEQ ID NO: 12233 - protein, 120 aa, Artificial Sequence
  Synthetic
QVQLVESGGGVVQPGRSLRLSCAASGFIFRDYAMHWVRQAPGKGLEWVAVIWSDGTVKHYADSVMGRFAISRDNSKNTVYLHMNSLRAEDTAVYYCARDYGTMTTFFDYWGQGTLVTVSS

SEQ ID NO: 12234 - protein, 13 aa, Artificial Sequence
  Synthetic
ARDYGTMTTFFDY

SEQ ID NO: 12235 - protein, 108 aa, Artificial Sequence
  Synthetic
DIQMTQSPSSLSASIGDRVTITCRASQSIGSHLNWFQQKPGKAPKLLIYTASTLQSGVPSRFSGSGSGTDFTLTISSLQPEDFATYYCQQSYSTPPWTFGQGTKVEIK

SEQ ID NO: 12236 - protein, 10 aa, Artificial Sequence
  Synthetic
QQSYSTPPWT

SEQ ID NO: 12237 - protein, 124 aa, Artificial Sequence
  Synthetic
EVQLLESGGGLVQPGGSLRLSCAASGFTFSSYAMTWVRQAPGKGLEWVSAISDSGDSTHHADSVKGRFTISRDNSKNTLYLQMNSLRAEDTAVYYCAKPPKPYGGTGAEYFQHWGQGTLVIVSS

SEQ ID NO: 12238 - protein, 17 aa, Artificial Sequence
  Synthetic
AKPPKPYGGTGAEYFQH

SEQ ID NO: 12239 - protein, 108 aa, Artificial Sequence
  Synthetic
SYVLTQPPSVSVAPGKTARITCGGNEIGSKSVHWYQQKPGQAPVLVVYHDSDRPSGIPERFFGSNSGNTATLTISRVEAGDEADFYCQVWDSTSPFVVFGGGTKLTVL

SEQ ID NO: 12240 - protein, 11 aa, Artificial Sequence
  Synthetic
QVWDSTSPFVV

SEQ ID NO: 12241 - protein, 124 aa, Artificial Sequence
  Synthetic
EVQLVESGGGLVQPGGSLRLSCAASGFTFSSYDMHWVRQVTGKGLEWVSAIGTSGDSYYSGSVKGRFTISRENAKNSLYLQMNSLRAGDTAVYYCARGDQLRHGIYYYYYMDVWGKGTTVTVSS

SEQ ID NO: 12242 - protein, 18 aa, Artificial Sequence
  Synthetic
ARGDQLRHGIYYYYYMDV

SEQ ID NO: 12243 - protein, 108 aa, Artificial Sequence
  Synthetic
DIQMTQSPSSLSASVGDRVTITCRASQTISRYLNWYQQKPGTAPKLLIYAASTLQSGVPSRFSGSGSGTDFTLTISSLQPEDFATYYCQQSYSAPPWTFGQGTKVEIK

SEQ ID NO: 12244 - protein, 10 aa, Artificial Sequence
  Synthetic
QQSYSAPPWT

SEQ ID NO: 12245 - protein, 122 aa, Artificial Sequence
  Synthetic
QVQLVESGGGMVQPGRSLRLSCAASGVSFSSSAMGWVRQAPGKGLEWVAVIPFDGNTKYYGDSVKGRFAISRDNSKSTLFLQMNNLRAEDTAVYYCAKARQSYAEENYFDYWGQGTLVTVSS

SEQ ID NO: 12246 - protein, 15 aa, Artificial Sequence
  Synthetic
AKARQSYAEENYFDY

SEQ ID NO: 12247 - protein, 108 aa, Artificial Sequence
  Synthetic
SYVLTQPPSVSVAPGRTARLTCGGNNIGSKSVHWYQQKPGQAPVLVIYYDSDRPSGIPERFSGSNSGITATLTISRVEAGDEADYYCQVWDSYSDHYVFGNGTKVTVL

SEQ ID NO: 12248 - protein, 11 aa, Artificial Sequence
  Synthetic
QVWDSYSDHYV

SEQ ID NO: 12249 - protein, 121 aa, Artificial Sequence
  Synthetic
QVQLQESGPGLVKPSQTLSLTCTVSGGSISSGGYYWSWIRQHPGKGLEWIGHVYYSGSTYYNPALKSRVTISVDTSKNQFSLNLSSVTAADTAVYYCAREVTGGLALFQHWGQGTLVTVSS

SEQ ID NO: 12250 - protein, 13 aa, Artificial Sequence
  Synthetic
AREVTGGLALFQH

SEQ ID NO: 12251 - protein, 107 aa, Artificial Sequence
  Synthetic
DIQMTQSPSSLSASVGDRVTITCQASQDISDYLNWYQQKPGKAPNLLIYAASKLETGVSSKFSGSGSGTRFTFTISSLQPEDIATYYCQQYDNLPWTFGQGTKVEIK

SEQ ID NO: 12252 - protein, 9 aa, Artificial Sequence
  Synthetic
QQYDNLPWT

SEQ ID NO: 12253 - protein, 122 aa, Artificial Sequence
  Synthetic
QVQLVQSGDEVKKPGSSVKVSCKASGGIFSSYAISWVRQAPGQGLEWMGGIIPMFGTPDYAEKFRGRLTITADESSNTVYMELSSLRSDDTAVYYCARATAPYSGSWYCFDPWGQGTLVTVS

SEQ ID NO: 12254 - protein, 16 aa, Artificial Sequence
  Synthetic
ARATAPYSGSWYCFDP

SEQ ID NO: 12255 - protein, 108 aa, Artificial Sequence
  Synthetic
DIQMTQSPSSLSASVGDRVTITCQASQDINNFLNWYQQKPGKAPKLLIYDASHLEAGVPSRFSGSGSGTDFTFTISSLQPEDIATYYCQQYDNLPPATFGQGTRLDIK

SEQ ID NO: 12256 - protein, 10 aa, Artificial Sequence
  Synthetic
QQYDNLPPAT

SEQ ID NO: 12257 - protein, 122 aa, Artificial Sequence
  Synthetic
QVQLVQSGAEVKKPGSSVRVSCKASGGTFSSSYTVSWVRQAPGHGLEWMGGFIPVFGTANYAQKFQGRVTITADESTSTAYMELSSLRSEDTAVYYCARELGIRAPDAFDIWGQGTMVSVSS

SEQ ID NO: 12258 - protein, 14 aa, Artificial Sequence
  Synthetic
ARELGIRAPDAFDI

SEQ ID NO: 12259 - protein, 107 aa, Artificial Sequence
  Synthetic
AIRMTQSPSSFSASTGDRVSMTCRASQGINNYLAWYQQKPGKAPKLLIYAASTLQSGVPSTFSGSGSGTDFTLTISSLQSEDFATYYCQQYYSYPPTFGQGTKLEIK

SEQ ID NO: 12260 - protein, 9 aa, Artificial Sequence
  Synthetic
QQYYSYPPT

SEQ ID NO: 12261 - protein, 121 aa, Artificial Sequence
  Synthetic
QVQLVESGGGVVQPGRSLRLSCAASGFAFRSYGMHWVRQAPGKGLEWVALIWDDGSTKHYADSVKGRFTISRDNSKNTLYLQMNSLRAEDTAVYSCARDWNWGMVGAFDIWGQGTTVTVSS

SEQ ID NO: 12262 - protein, 14 aa, Artificial Sequence
  Synthetic
ARDWNWGMVGAFDI

SEQ ID NO: 12263 - protein, 108 aa, Artificial Sequence
  Synthetic
DIQMTQSPSSLSASVGDRVTITCRASQSISSYLNWYQQKPGKAPKLLIYGAASLQSGVPSRFSGSGSGTDFTLTISSLQPEDFATYYCQQSYNTPPWTFGQGTKVEIK

SEQ ID NO: 12264 - protein, 10 aa, Artificial Sequence
  Synthetic
QQSYNTPPWT

SEQ ID NO: 12265 - protein, 121 aa, Artificial Sequence
  Synthetic
QVQLQESGPGLVKPSQTLSLTCTVSGGSISSANYYWSWIRQHPGKGLEWIGYIFYTGITYYNPSLKSRVTISVDTSKNQFSLILSSVTAADTAVYYCARVSRYQLLPFDYWGQGTLVTVSS

SEQ ID NO: 12266 - protein, 13 aa, Artificial Sequence
  Synthetic
ARVSRYQLLPFDY

SEQ ID NO: 12267 - protein, 110 aa, Artificial Sequence
  Synthetic
QSVLTQPPSASGSPGQSVTISCTGTSSDIGGYDYVSWYQQHPGKAPKLMIYEVTQRPSGVPDRFSGSKSGNTASLTVSGLQAEDEADYYCSSYAGSNNPIFGGGTKLTVL

SEQ ID NO: 12268 - protein, 10 aa, Artificial Sequence
  Synthetic
SSYAGSNNPI

SEQ ID NO: 12269 - protein, 125 aa, Artificial Sequence
  Synthetic
QLQLQESGPGLVKPSETLSLTCSVSGGSISRSSYYWGWIRQSPGKGLEWVGSIYYSGYTYYNPSLKSRVTISVDTSKNQFSLRLSSVTAADTALYYCSRLPYHFGSESYYREDYWGQGILVTVSS

SEQ ID NO: 12270 - protein, 17 aa, Artificial Sequence
  Synthetic
SRLPYHFGSESYYREDY

SEQ ID NO: 12271 - protein, 108 aa, Artificial Sequence
  Synthetic
EIVLTQSPATLSLSPGERATLSCRASESVSRYLAWYQQKPGQAPRLLIYDASNRATGIPARFSGSGSGTDFTLTISSLEPEDFAVYYCQQRNNWPALSFGGGTKVEIK

SEQ ID NO: 12272 - protein, 10 aa, Artificial Sequence
  Synthetic
QQRNNWPALS

SEQ ID NO: 12273 - protein, 125 aa, Artificial Sequence
  Synthetic
QLQLQESGPRLVKPSETLSLTCTVSGGSISSSSFYWGWIRQPPGKGLEWIGSIFYTGITYYTPSLKSRVTISVDTSKDQFSLRLSSVTAADTAVYYCARVSRYCTTTTCYMVDYWGQGTLVTVSS

SEQ ID NO: 12274 - protein, 17 aa, Artificial Sequence
  Synthetic
ARVSRYCTTTTCYMVDY

SEQ ID NO: 12275 - protein, 110 aa, Artificial Sequence
  Synthetic
QSVLTQPASVSASRGQSITISCTGTSSDVGSYDFVSWYQQLPGKAPKLIIFEVSKRPSGISNRFSGSKSGNTASLTISGLQNEDEADYYCCSYVGSSTLVFGTGTKVTVL

SEQ ID NO: 12276 - protein, 10 aa, Artificial Sequence
  Synthetic
CSYVGSSTLV

SEQ ID NO: 12277 - protein, 115 aa, Artificial Sequence
  Synthetic
EVQLVESGGGLVQPGGSLRLSCAASEFIVSRNYMAWVRQAPGKGLEWVSVIYSGGSTFYADSVKGRFTISRDNSKNTLYLQMNSLRAEDTAVYYCARDLRGAFDYWGQGTLVTVS

SEQ ID NO: 12278 - protein, 10 aa, Artificial Sequence
  Synthetic
ARDLRGAFDY

SEQ ID NO: 12279 - protein, 108 aa, Artificial Sequence
  Synthetic
DIQMTQSPSSLSASVGDRVTITCQASQGISNSLNWYQQKPGKAPKLLIYDASNLGTGVPSRFSGSGSGTDFTFTISSLQPEDIATYYCQQYDNLRMYTFGQGTKLEIK

SEQ ID NO: 12280 - protein, 10 aa, Artificial Sequence
  Synthetic
QQYDNLRMYT

SEQ ID NO: 12281 - protein, 118 aa, Artificial Sequence
  Synthetic
EVQLVESGGGLVQPGGSLRLSCVASEIIVSSNYMSWVRQAPGKGLEWVSVIYSGGTTEYADSVKGRFTISRHNSKNMLYLQMNSLRAEDTAVYYCARDLSIAGGVDIWGQGTMVTVSS

SEQ ID NO: 12282 - protein, 12 aa, Artificial Sequence
  Synthetic
ARDLSIAGGVDI

SEQ ID NO: 12283 - protein, 107 aa, Artificial Sequence
  Synthetic
DIQLTQSPSFLSASAGDRVTITCRASQGISNYLAWYQQKPGKAPKLLIYAASTLQSGVPSRFSGSGSGTEFTLTISSLQPEDFATYYCQQLISYQFSFGPGTKVDSK

SEQ ID NO: 12284 - protein, 9 aa, Artificial Sequence
  Synthetic
QQLISYQFS

SEQ ID NO: 12285 - protein, 120 aa, Artificial Sequence
  Synthetic
QVQLQESGPGLVKPSGTLSLTCDVSFGSIRSSNWWSWVRQTPGKGLEWIGEVFHRGSIDYNPSLKSRVTISLDETKNQFSLNLTSVTAADTAVYYCARRPLTDFYYMDVWGKGTTVTVSS

SEQ ID NO: 12286 - protein, 13 aa, Artificial Sequence
  Synthetic
ARRPLTDFYYMDV

SEQ ID NO: 12287 - protein, 107 aa, Artificial Sequence
  Synthetic
DIQMTQSPSSLSASVGDRVTITCRASQTINSYLNWYQQKPGKAPKFLIYAASTLQSGVPSRFSGSGSGTDFTLTISSLQPEDFATYFCQQSHSMPLTFGGGTKVEIK

SEQ ID NO: 12288 - protein, 9 aa, Artificial Sequence
  Synthetic
QQSHSMPLT

SEQ ID NO: 12289 - protein, 120 aa, Artificial Sequence
  Synthetic
QVQLVESGGGVVQPGRSLRLSCAASGFTFTDYAMHWVRQPPGKGLEWVAVILYDGRSKLYADSVKGRFTISRDNSKNTLFLQMNSLRADDTAVYYCARDEGTMVTFFDYWGQGTLVTVSS

SEQ ID NO: 12290 - protein, 13 aa, Artificial Sequence
  Synthetic
ARDEGTMVTFFDY

SEQ ID NO: 12291 - protein, 108 aa, Artificial Sequence
  Synthetic
DIQMTQSPSSLSASVGDRVTITCRASQSIRSDLNWYQQKPGKAPKLLIYAASTLQSGVPSRFSGTGSATDFTLTISGLQPEDFATYYCQQSYNTPPWTFGQGTKVEIK

SEQ ID NO: 12292 - protein, 10 aa, Artificial Sequence
  Synthetic
QQSYNTPPWT

SEQ ID NO: 12293 - protein, 120 aa, Artificial Sequence
  Synthetic
EVQLLESGGGLVQPGGSLRLSCAASGFTFSSYAMSWVRQAPGKGLEWVSGLGGSGGMTFYADSVKGRFSISRDNSQNTLYLQMNSLRAEDTALYYCAREGMAVDWYFDLWGRGTLVTVSS

SEQ ID NO: 12294 - protein, 13 aa, Artificial Sequence
  Synthetic
AREGMAVDWYFDL

SEQ ID NO: 12295 - protein, 108 aa, Artificial Sequence
  Synthetic
DIQMTQSPSSLSASVGDRVTITCRASQSIRDYLNWYQQKPGKAPKLLIHSASSLQGGVPSRFSGSGSGTDFTLTISSLQPEDFATYFCQQSYSTPPVTFGGGTKVEIK

SEQ ID NO: 12296 - protein, 10 aa, Artificial Sequence
  Synthetic
QQSYSTPPVT

SEQ ID NO: 12297 - protein, 120 aa, Artificial Sequence
  Synthetic
QVQLVQSGAEVKKPGASVKVSCKASGYTFSSNYLHWVRQAPGQGLEWIGIIYPSSGSTRYAQKFQGRLSMTRDTSTNTVYMDLSSLRSEDTAVYYCAREGCSSTSCFDFWGQGTLVTVSS

SEQ ID NO: 12298 - protein, 13 aa, Artificial Sequence
  Synthetic
AREGCSSTSCFDF

SEQ ID NO: 12299 - protein, 109 aa, Artificial Sequence
  Synthetic
SYVLTQPPSVSVAPGKTATITCGEDNIGSKSVHWYQQKPGQAPVLVVYDDSDRPSGIPERFSGSNSGNTATLTISRVEAGDEADYYCQVWDGSSDHFYVFGTGTKVTVL

SEQ ID NO: 12300 - protein, 12 aa, Artificial Sequence
  Synthetic
QVWDGSSDHFYV

SEQ ID NO: 12301 - protein, 123 aa, Artificial Sequence
  Synthetic
QLQLQESGPGLVKPSETLSLTCTVSGDSISRSTYYWGWIRQPPGKGLEWIGNIYYTGSTYYNPSLKSRVTMSVDTSKNQFSLKLNSVTAADTAVYYCSRVLTIFGVVINFDSWGLGTLITVSS

SEQ ID NO: 12302 - protein, 15 aa, Artificial Sequence
  Synthetic
SRVLTIFGVVINFDS

SEQ ID NO: 12303 - protein, 111 aa, Artificial Sequence
  Synthetic
NFMLTQPHSVSESPGKTVTISCTASSGSIASHYVQWYQQRPGSAPTTVIYENDQRPSGVPDRFSGSIDSSSNSASLTISGLKTEDEADYSCQSYDGDRLVVFGGGTKLTVL

SEQ ID NO: 12304 - protein, 10 aa, Artificial Sequence
  Synthetic
QSYDGDRLVV

SEQ ID NO: 12305 - protein, 123 aa, Artificial Sequence
  Synthetic
QVQLVQSGAEVKKPGSSVKVSCKASGGTLSSYGFNWVRQAPGQGLEWMGGIIPIIGRTNYAQKFQGRVTFTADESTSTVYMELSTLRSEDRAVYYCARDAKDYGDYLGAFDLWGQGTTVTVSS

SEQ ID NO: 12306 - protein, 16 aa, Artificial Sequence
  Synthetic
ARDAKDYGDYLGAFDL

SEQ ID NO: 12307 - protein, 109 aa, Artificial Sequence
  Synthetic
EIVMTQSPATLSVSPGERATLSCRASQSVSGNLAWYQQKPGQAPRLLIYGASTRATGIPARFSGSGSGTEFTLTISSLQSEDFALYYCQQYSNWPPTYTFGQGTKLEIK

SEQ ID NO: 12308 - protein, 11 aa, Artificial Sequence
  Synthetic
QQYSNWPPTYT

SEQ ID NO: 12309 - protein, 126 aa, Artificial Sequence
  Synthetic
EVQLVESGGGLVQPGGSLRLSCAASGFTFSTYWMSWVRQAPGKGLEWVAKIKQDGSEKYYVDSVKGRFTISRDNAKNSLYLQINSLRAEDTAVYFCARHPQQLVPYYYFYYYMDVWGKGTTVTVSS

SEQ ID NO: 12310 - protein, 19 aa, Artificial Sequence
  Synthetic
ARHPQQLVPYYYFYYYMDV

SEQ ID NO: 12311 - protein, 108 aa, Artificial Sequence
  Synthetic
EIVMTQSPATLSVSPGERATLSCRASQSVISDLAWYQQKPGQAPRLLIYGASTRATGIPARFSGSGSGTEFTLTISSLQSEDFAVYYCQQYNNWPPVTFGGGTKVEIK

SEQ ID NO: 12312 - protein, 10 aa, Artificial Sequence
  Synthetic
QQYNNWPPVT

SEQ ID NO: 12313 - protein, 119 aa, Artificial Sequence
  Synthetic
QLQLQESGPGLVRPSETLSLTCTVSGVYISSSTFYWGWIRQPPGKGLEWIGSVYYAGSTYSNPSLKSRVTLSVDTSKSQFSLELSSVTAADTAVYYCARHPPAWEFDFWGQGILVTVSS

SEQ ID NO: 12314 - protein, 11 aa, Artificial Sequence
  Synthetic
ARHPPAWEFDF

SEQ ID NO: 12315 - protein, 112 aa, Artificial Sequence
  Synthetic
DVVMTQSPLSLPVTLGQPASISCRSSQSLVYSDGNTYLSWFQQRPGQSPRRLIYQVSNRDSGVPDRFSGSGSGTYFTLKISRVEAEDVGVYYCMQGTHWPPAFGPGTKVDIK

SEQ ID NO: 12316 - protein, 9 aa, Artificial Sequence
  Synthetic
MQGTHWPPA

SEQ ID NO: 12317 - protein, 120 aa, Artificial Sequence
  Synthetic
QVQLVESGGGVVQPGKALRLSCAASGFSFNTSSMHWVRQTPGKGLEWVAVILYDGTYKDYADSVKGRFTISRDNSKNTLYLQLNSLRVEDTAVYYCARDTGAVVTHFDYWGQGTLVTVSS

SEQ ID NO: 12318 - protein, 13 aa, Artificial Sequence
  Synthetic
ARDTGAVVTHFDY

SEQ ID NO: 12319 - protein, 108 aa, Artificial Sequence
  Synthetic
DIQMTQSPSSLSASVGDRVTITCRASQSISSYLNWYQQKPGTAPKLLIYVASTLQSGVPSRFSGSGSGTDFTLTISSLQPEDFATYYCQQSYNTPPWTFGQGTKVEIK

SEQ ID NO: 12320 - protein, 10 aa, Artificial Sequence
  Synthetic
QQSYNTPPWT

SEQ ID NO: 12321 - protein, 125 aa, Artificial Sequence
  Synthetic
QVQLQQWGAGLLKPSETLSLTCAVYGAPFSGYYWSWIRQPPGKGLEWIGEINDSGRTNYNPSLKSRVTMSADTSKNQFSLKLTSVTAADTALYYCARETYYYDSSGFGANWFDPWGQGTLVSVSS

SEQ ID NO: 12322 - protein, 19 aa, Artificial Sequence
  Synthetic
ARETYYYDSSGFGANWFDP

SEQ ID NO: 12323 - protein, 111 aa, Artificial Sequence
  Synthetic
QSVLTQPPSVSGAPGQRVTISCTGSSSNIGAGYHVHWYQQVPGTAPKLLIYDNINRPSGVPDRFSGSKSGTSGSLAITGLQAEDEADYYCQSYDTSLSGYVFGTGTKVTVL

SEQ ID NO: 12324 - protein, 11 aa, Artificial Sequence
  Synthetic
QSYDTSLSGYV

SEQ ID NO: 12325 - protein, 122 aa, Artificial Sequence
  Synthetic
QVQLQESGPGLVKPSETLSLTCTVSGGSISSYYWSWIRQPPGKGLEWIGYIYYSGSTNYNPSLQSRATISVDTSKNQFSLKVSSVTAADTAVYFCARRSSPDYYYYFYMDVWGKGTTVTVSS

SEQ ID NO: 12326 - protein, 16 aa, Artificial Sequence
  Synthetic
ARRSSPDYYYYFYMDV

SEQ ID NO: 12327 - protein, 106 aa, Artificial Sequence
  Synthetic
DIQMTQSPVSLSASIGDRVTITCRASQSISNYLNWYQHKPGKAPQLLIYAASSLQSGVPSRFSGSGSATDFTLTISSLQPEDFATYYCQQTYSTWTFGQGTKVEIK

SEQ ID NO: 12328 - protein, 8 aa, Artificial Sequence
  Synthetic
QQTYSTWT

SEQ ID NO: 12329 - protein, 118 aa, Artificial Sequence
  Synthetic
EVQLVQSGAEVKKPGESLRISCKGSGYSYWISWVRQMPGKGLEWMGRIDPSDSYTDYSPSFKGHVTISSDKSINTAYLQWSSLKASDTAMYYCAQHSPSYGDLLPDLWGRGTLVTVSS

SEQ ID NO: 12330 - protein, 14 aa, Artificial Sequence
  Synthetic
AQHSPSYGDLLPDL

SEQ ID NO: 12331 - protein, 109 aa, Artificial Sequence
  Synthetic
EIVLTQSPVSLSLSPGERATLSCRASQSVTGNYLAWYQQKPGQGPRLLIYAASSRATGIPDRFSGSGSGTDFTLTISRLEPEDFAVYYCQHYSSSPPWTFGQGTKVEIK

SEQ ID NO: 12332 - protein, 10 aa, Artificial Sequence
  Synthetic
QHYSSSPPWT

SEQ ID NO: 12333 - protein, 120 aa, Artificial Sequence
  Synthetic
QVQLVESGGAVVQPGRSLRLSCAASGFTFSTYGMHWVRQAPGKGLEWVAVISDDGSYKSYADSVTGRCAISRDNSKNTVYLQMNSLRDEDTAVYYCARDQGRATTYFDYWGQGTLVTVSS

SEQ ID NO: 12334 - protein, 13 aa, Artificial Sequence
  Synthetic
ARDQGRATTYFDY

SEQ ID NO: 12335 - protein, 108 aa, Artificial Sequence
  Synthetic
  misc_feature (10)..(10): Xaa can be any naturally occurring amino acid
DIQMTQSPVXLSASVGDRVTITCRASQSISIYLNWYQQKPGKAPKLLIYDASTLQSGVPSRFSGSGSGTDFTLTISSLQPEDFATYYCQQSYSTPAWTFGQGTKVEIK

SEQ ID NO: 12336 - protein, 10 aa, Artificial Sequence [sequence omitted]

SEQ ID NO: 12337 - protein, 124 aa, Artificial Sequence
  Synthetic
EVQLVESGGDLIQPGGSLRLSCAGSGFTVGSNYMSWVRQAPGKGLEWVAIIYSTGYTYYADSVKGRFTISRDNSKNTLYFQMNSLRAEDTAVYYCARNDFWSGSKGTYWYFDLWGRGTLVTVSS

SEQ ID NO: 12338 - protein, 18 aa, Artificial Sequence
  Synthetic
ARNDFWSGSKGTYWYFDL

SEQ ID NO: 12339 - protein, 111 aa, Artificial Sequence
  Synthetic
QSVLTQPPSVSGAPGQRVTISCTGSSSNIGAGYDVHWYQHLPGTAPKLLIYGNINRPSGVPDRFSGSKSGTSASLAITGLQAEDEADYYCQSYDSSLSGSVFGGGTKLTVL

SEQ ID NO: 12340 - protein, 11 aa, Artificial Sequence
  Synthetic
QSYDSSLSGSV

SEQ ID NO: 12341 - protein, 122 aa, Artificial Sequence
  Synthetic
EVQLLESGGGLVQPGGSLRLSCAASGFTFSNYVMNWVRQAPGKGLEWVSGISGSGDITSYADSVKGRFTISRDNSKNTVYLQMNSLTAEDTAVYYCAKDFGVVIMVDLLDYWGQGTLVTVSS

SEQ ID NO: 12342 - protein, 15 aa, Artificial Sequence
  Synthetic
AKDFGVVIMVDLLDY

SEQ ID NO: 12343 - protein, 107 aa, Artificial Sequence
  Synthetic
DIQMTQSPSSLSASVGDRVTITCRASQTISTYLNWYQQKVGRAPKLLIYAASSLQDGVPSRFSGSGSGTDFTLTITSLQPEDFATYYCQQSYSSPPTFGPGTKMDVK

SEQ ID NO: 12344 - protein, 9 aa, Artificial Sequence
  Synthetic
QQSYSSPPT

SEQ ID NO: 12345 - protein, 117 aa, Artificial Sequence
  Synthetic
EVQLVESGGGLVKPGGSLRLSCEASGFTFTNYNMHWVRQAPGKGLEWVSSISGGSDYIYYADSVQGRFTISRDSAKSSLFLQMNSLRADDTAVYYCAREAYSTGCDYWGQGTLVTVS

SEQ ID NO: 12346 - protein, 11 aa, Artificial Sequence
  Synthetic
AREAYSTGCDY

SEQ ID NO: 12347 - protein, 109 aa, Artificial Sequence
  Synthetic
EIVLTQSPGTLSLSPGERATLSCRASQSVSSSYLAWYQQKPGQAPRLLIYGASSRAIDIPVRFSGSGSGTDFTLTISRLEPEDFAVYYCQQYGSSPLIIFGQGTRLDLK

SEQ ID NO: 12348 - protein, 10 aa, Artificial Sequence
  Synthetic
QQYGSSPLII

SEQ ID NO: 12349 - protein, 127 aa, Artificial Sequence
  Synthetic
QVQLVQSGAEVKKPGSSVKVSCKASGGTFDSFAMSWVRQAPGQGLEWMGGIIFHVRRASYAQKFQGRATITADESTTTAYLELSSLRSDDTAYYYCARDGGYCSGPNCYLPNAFDVWGQGTMVAVSS

SEQ ID NO: 12350 - protein, 20 aa, Artificial Sequence
  Synthetic
ARDGGYCSGPNCYLPNAFDV

SEQ ID NO: 12351 - protein, 110 aa, Artificial Sequence
  Synthetic
QSVLTQPASVSGSPGQSITISCTGSSSDVGNYNLVSWYQQHPDKPPKLIIYEVNKRPSGVSPRFSGSKSGNTASLTISGLQAEDEADYYCCSNAVTTTAIFGGGTKVTVL

SEQ ID NO: 12352 - protein, 10 aa, Artificial Sequence
  Synthetic
CSNAVTTTAI

SEQ ID NO: 12353 - protein, 117 aa, Artificial Sequence
  Synthetic
QVQLQESGPGLVKPSETLSLTCNVSGVSISGYYWNWIRQPPGKGLEWIGYLYHSGYTNYNPSLKSRVTISVDTSKNHFSLKLSSVTAADTAVYYCAREGTTGYFEYWGQGILVTVSS

SEQ ID NO: 12354 - protein, 11 aa, Artificial Sequence
  Synthetic
AREGTTGYFEY

SEQ ID NO: 12355 - protein, 107 aa, Artificial Sequence
  Synthetic
EIVLTQSPGTLSLSPGERATLSCRASQSLLSRYLAWYQQKPGQAPRLLIYGASSRATDIPDRFSGSGSGTDFTLTISRLEPGDFAVYFCHQYGGSHPTLGQGTRLEI

SEQ ID NO: 12356 - protein, 9 aa, Artificial Sequence
  Synthetic
HQYGGSHPT

SEQ ID NO: 12357 - protein, 127 aa, Artificial Sequence
  Synthetic
QVQLVESGGGVVQPGRSLRLSCAASGFTFSSYDFQWVRQAPGKGLEWVAVISSDGSDKYSADSVRGRFTISRDNSDNTVYLHMNTLRPEDTAVYYCARAFKGFSSSYYYYYHFMDVWGKGTAVTVSS

SEQ ID NO: 12358 - protein, 20 aa, Artificial Sequence
  Synthetic
ARAFKGFSSSYYYYYHFMDV

SEQ ID NO: 12359 - protein, 107 aa, Artificial Sequence
  Synthetic
DIQMTQSPSSLSASVGDRITITCQASQDIRNYLNWYQHKPGKAPKLLIYDASNLATGVPSRFSGSGSGTDFSFVISGLQPEDIATYYCQHYDNPGLTFGGGTKVEIK

SEQ ID NO: 12360 - protein, 9 aa, Artificial Sequence
  Synthetic
QHYDNPGLT

SEQ ID NO: 12361 - protein, 122 aa, Artificial Sequence
  Synthetic
QVQLQESGPGLVKSAETLSLTCTVSGGSINSYYWTWIRQPPGKGLEWIGYMYFSGNTYYNPSLKSRVSMSVDTSKNQFSLKLSSVTAADTAVYFCARGFAVPAASYNWFDPWGQGILVTVSS

SEQ ID NO: 12362 - protein, 16 aa, Artificial Sequence
  Synthetic
ARGFAVPAASYNWFDP

SEQ ID NO: 12363 - protein, 106 aa, Artificial Sequence
  Synthetic
SYVLTQPVSVSVALGQTARISCGINNIETRNVHWYQQRPGQAPVVVIYKNNIRPSGIPERFSGSNSENTATLTISKAQAGDEADYYCQMWDSSIVIFGGGTKLTVL

SEQ ID NO: 12364 - protein, 9 aa, Artificial Sequence
  Synthetic
QMWDSSIVI

SEQ ID NO: 12365 - protein, 119 aa, Artificial Sequence
  Synthetic
QVQLQESGPGLVKPSQTLSLTCTVSGGSISGSGYYWSWIRQHPGKGLEWIGYIYYSGSTYYNPSLKSRVTISVDTSKNQFSLKLSSVTAADTAVYYCAREGQSGYYLLWGQGTLVTVSS

SEQ ID NO: 12366 - protein, 11 aa, Artificial Sequence
  Synthetic
AREGQSGYYLL

SEQ ID NO: 12367 - protein, 108 aa, Artificial Sequence
  Synthetic
EIVLTQSPVSLSLSPGERATLSCRASQSVISRNVAWYQQKPGQAPRLLIYGASSRATGIPDRFSGSGSGTDFTLTISGLEPEDFAVYHCQQYGTSLPTFGQGTKVEIK

SEQ ID NO: 12368 - protein, 9 aa, Artificial Sequence
  Synthetic
QQYGTSLPT

SEQ ID NO: 12369 - protein, 124 aa, Artificial Sequence
  Synthetic
QVQLQESGPGLVKPSETLSLTCTVSGGSVSSNSYYWNWIRQPPGKGLEWVAYIHYSGSTNYNPSLKSRVTISVDTSKNQFSLKLKSVTAADTAVYYCAINYDNSGWGASYFDYWGQGALVTVSS

SEQ ID NO: 12370 - protein, 16 aa, Artificial Sequence
  Synthetic
AINYDNSGWGASYFDY

SEQ ID NO: 12371 - protein, 111 aa, Artificial Sequence
  Synthetic
QSVLTQPPSVSGAPGQRVTISCTGSSSNIGAGYDVHWYQQLPGTVPKLLIFGHINRPSGVPDRFSGSKSGTSASLAIAGLQAEDEADYYCQSYDSSLSGLVFGGGTKLTVL

SEQ ID NO: 12372 - protein, 11 aa, Artificial Sequence
  Synthetic
QSYDSSLSGLV

SEQ ID NO: 12373 - protein, 125 aa, Artificial Sequence
  Synthetic
QLQLQESGPRLLKPSETLSLTCTVSGGSVSSSTYYWGWIRQPPGKGLEWLGSIFYSGISYYNPSLQSRVSMSVDTSKNQFSLKLSSVTAADTAMYFCAREVRYCSSSICYTFDIWGQGTLLTVSS

SEQ ID NO: 12374 - protein, 17 aa, Artificial Sequence
  Synthetic
AREVRYCSSSICYTFDI

SEQ ID NO: 12375 - protein, 109 aa, Artificial Sequence
  Synthetic
QSVLTQPPSASGSPGQSVTIACTGTSSDVGSYDYVSWYQQHPGKAPKLIIYEVTKRPSGVPDRFSGSKSGNTASLTVSGLQAEDEADYYCYSYVGSNRLFGGGTKLTVL

SEQ ID NO: 12376 - protein, 9 aa, Artificial Sequence
  Synthetic
YSYVGSNRL

SEQ ID NO: 12377 - protein, 120 aa, Artificial Sequence
  Synthetic
EVQLVQSGAEVKKPGESLKISCKGSGYSFTNYWIAWVRQMPGKGLEWMGLIYPGDSDTRYSPSCQGQVTISADKSISTAYLQWSSLKASDTAMYYCARPFSHYTTSWYFWGQGTLVTVSS

SEQ ID NO: 12378 - protein, 13 aa, Artificial Sequence
  Synthetic
ARPFSHYTTSWYF

SEQ ID NO: 12379 - protein, 107 aa, Artificial Sequence
  Synthetic
SYVLTQPPSVSVAPGKTARITCGGNNIGSKSVNWYQQKPGQAPVLFVYNDSDRPLGIPERFSGSKSGDSATLTIGRVEAGDEADYYCHVWDTSSDPFFGGGTKLTVL

SEQ ID NO: 12380 - protein, 10 aa, Artificial Sequence
  Synthetic
HVWDTSSDPF

SEQ ID NO: 12381 - protein, 122 aa, Artificial Sequence
  Synthetic
EVQLVESGGGLVKPGGSLRLSCAASGFTFNTHSMNWVRQAPGKGLEWVSSISSTRSYIYYADSVKGRASISRDNAKNSLYLQMNSLRAEDTAVYYCAKTSGSWYGNSAFDIWGQGTMVTVSS

SEQ ID NO: 12382 - protein, 15 aa, Artificial Sequence
  Synthetic
AKTSGSWYGNSAFDI

SEQ ID NO: 12383 - protein, 110 aa, Artificial Sequence
  Synthetic
QSVLTQPPSASGTPGQRVTISCSGSSSNIGSNAVNWYQQLPGTAPKLLIYSHNQRPSGVPARFSGSKSGTSASLAISGLQSEDEADYYCAAWDDSLNGPVFGGGTKLTVL

SEQ ID NO: 12384 - protein, 11 aa, Artificial Sequence
  Synthetic
AAWDDSLNGPV

SEQ ID NO: 12385 - protein, 125 aa, Artificial Sequence
  Synthetic
QVQLQESGPGLVKPSQTLSLTCTVSGGSIRSSGYYWTWIRHHPGKGLEWIGHIYYSGTTYYNPSLKSQITMAVDTSKNQVSLKLSSVTAADTAVYYCARLPRFLTDYYSGAFDIWGQGTMVTVSS

SEQ ID NO: 12386 - protein, 17 aa, Artificial Sequence
  Synthetic
ARLPRFLTDYYSGAFDI

SEQ ID NO: 12387 - protein, 109 aa, Artificial Sequence
  Synthetic
QSALTQPASVSGFPGQSITISCTGTSSDVGSYDLVSWYQHHPGKAPKLIIYEVDKRPSGISNRFSGSKSGNTASLRISGLQAEDEAEYHCCSYAGNIALFGGGTKLTVL

SEQ ID NO: 12388 - protein, 9 aa, Artificial Sequence
  Synthetic
CSYAGNIAL

SEQ ID NO: 12389 - protein, 121 aa, Artificial Sequence
  Synthetic
EVQLVQSGAEVKKPGESLKISCKGSGYSFSNYWIGWVRQMPGKGLEWMGILYPGDSNTIYSPSFQGQVTISGDTSTSTAYLQWSSLKASDTAMYYCARQISIFGVVSENYWGQGTLVTVSS

SEQ ID NO: 12390 - protein, 14 aa, Artificial Sequence
  Synthetic
ARQISIFGVVSENY

SEQ ID NO: 12391 - protein, 111 aa, Artificial Sequence; identical to SEQ ID NO: 272
  Synthetic

SEQ ID NO: 12392 - protein, 10 aa, Artificial Sequence
  Synthetic
QSYDSSSFWV

SEQ ID NO: 12393 - protein, 123 aa, Artificial Sequence
  Synthetic
QVQLQESGPGLVKPSGTLSLTCAVSGGSISTSYWWSWVRQTPGKGLEWIGKIYHSGSTKYNPSLKSRVTISVDKSKNQLSLKLNSVTAADTAVYYCAREKHYYGRDFEAFDIWGQGTMVTVSS

SEQ ID NO: 12394 - protein, 16 aa, Artificial Sequence
  Synthetic
AREKHYYGRDFEAFDI

SEQ ID NO: 12395 - protein, 107 aa, Artificial Sequence; identical to SEQ ID NO: 6083
  Synthetic

SEQ ID NO: 12396 - protein, 9 aa, Artificial Sequence
  Synthetic
QQSYSSMYT

SEQ ID NO: 12397 - protein, 123 aa, Artificial Sequence
  Synthetic
QLQLQESGPGLVKPSETLSLTCTVSGGSISSNTYYWGWIRQPPGKGLEWIGNIFYTGITYYNPSLKSRVAMAVDTSKSQLSLQVTSVTAADTAVYFCARDTRFSGYVASFDLWGHGTTVIVSS

SEQ ID NO: 12398 - protein, 15 aa, Artificial Sequence
  Synthetic
ARDTRFSGYVASFDL

SEQ ID NO: 12399 - protein, 108 aa, Artificial Sequence
  Synthetic
QSVLTQPPSASGSLGQSVTISCTGTRSDVGSYDYVSWYQQHPGKAPKLMIFEVTKRPSGVPDRFSGSKSGNTASLTVSGLQPDDEAYYYCGSYAGSYRIFGGGTKLTV

SEQ ID NO: 12400 - protein, 9 aa, Artificial Sequence
  Synthetic
GSYAGSYRI

SEQ ID NO: 12401 - protein, 115 aa, Artificial Sequence
  Synthetic
EVQLVESGGGLVQPGGSLRLSCAASGLIVGSNYMNWVRQAPGKGLEWVSVMYPGGTTDYVDSVKGRFTISRHNSKNTLYLQMNTLRTEDTAVYYCVRESLALDVWGKGTTVTVSS

SEQ ID NO: 12402 - protein, 9 aa, Artificial Sequence
  Synthetic
VRESLALDV

SEQ ID NO: 12403 - protein, 107 aa, Artificial Sequence
  Synthetic
DIQLTQSPSFLSASVGDRVTITCRASQGISTYLAWYQQKPGKAPKLLIYAASTLQSGVPSRFSGSGSGTEFTLTISSLQPEDFATYYCQQLNNYPPAFGGGTKVEIK

SEQ ID NO: 12404 - protein, 9 aa, Artificial Sequence
  Synthetic
QQLNNYPPA

SEQ ID NO: 12405 - protein, 123 aa, Artificial Sequence
  Synthetic
EVQLVESGGGLVQPGGSLRLSCSASGFIFSNYAMHWVRQAPGKGPEYVSGLSSDGLITYYADSVKGRFTISRDNSKNTLSLQMTSLRSDDTAVYYCVKDVPSSVAMTDVFDIWGQGTMVTVSS

SEQ ID NO: 12406 - protein, 16 aa, Artificial Sequence
  Synthetic
VKDVPSSVAMTDVFDI

SEQ ID NO: 12407 - protein, 107 aa, Artificial Sequence
  Synthetic
DIQMTQSPSSLSASVGDRVTITCRASQTINRFLNWYQQKPGKAPKLLIYGASSLQSGVPSRFSGSGSGTDFTLTISSLQSEDFATYYCHQSYITPGTFGQGTKVEIK

SEQ ID NO: 12408 - protein, 9 aa, Artificial Sequence
  Synthetic
HQSYITPGT

SEQ ID NO: 12409 - protein, 122 aa, Artificial Sequence
  Synthetic
QVQLVESGGGVVQPGRSLRLSCAASGFTFTTYSMHWVRQAPGKGLEWVAVVSNDGSGKFYADSVKGRVTISRDNSKNTLFLQMNSLRAEDTAIYYCVRDKDADYPSVVFDFWGQGAMVTVSS

SEQ ID NO: 12410 - protein, 15 aa, Artificial Sequence
  Synthetic
VRDKDADYPSVVFDF

SEQ ID NO: 12411 - protein, 108 aa, Artificial Sequence
  Synthetic
  misc_feature (9)..(9): Xaa can be any naturally occurring amino acid
DIQMTQSPXSLSASVGDRVTITCRASQSISNFLNWYQQKPGKAPKLLIYAASSLQSGVPSRFSGSGSGTDFTLTISTLQPEDFATYYCQQSYTTLALTFGGGTKVEIK

SEQ ID NO: 12412 - protein, 10 aa, Artificial Sequence
  Synthetic
QQSYTTLALT

SEQ ID NO: 12413 - protein, 120 aa, Artificial Sequence
  Synthetic
QVQLVESGGAVVQPGRSLRLSCAASGFTFSTYGMHWVRQAPGKGLEWVAVISDDGSYKSYADSVTGRCTISRDNSKNTVYLQMNSLRDEDTAVYYCARDQGRATTYFDYWGQGTLVTVSS

SEQ ID NO: 12414 - protein, 13 aa, Artificial Sequence
  Synthetic
ARDQGRATTYFDY

SEQ ID NO: 12415 - protein, 108 aa, Artificial Sequence
  Synthetic
  misc_feature (9)..(9): Xaa can be any naturally occurring amino acid
DIQMTQSPXSLSASVGDRVTITCRASQSIGIYLNWYQQKPGKAPKLLIYDASTLQSGVPSRFSGSGSGTDFTLTISSLQPEDFATYYCQQSYSTPAWTFGQGTKVEIK

SEQ ID NO: 12416 - protein, 10 aa, Artificial Sequence [sequence omitted]

SEQ ID NO: 12417 - protein, 117 aa, Artificial Sequence
  Synthetic
QVQLQESGPGLVKPSETLSLTCSVSGGSMSGYYWSWIRQPPGKGLEWIGYIYHSGSPRYNPTLRSRVTISVDTSKNQFSLKLNSVTAADTAVYYCAKEGTTGYFEHWGQGTLVTVSS

SEQ ID NO: 12418 - protein, 11 aa, Artificial Sequence
  Synthetic
AKEGTTGYFEH

SEQ ID NO: 12419 - protein, 108 aa, Artificial Sequence
  Synthetic
  misc_feature (9)..(9): Xaa can be any naturally occurring amino acid
EIVLTQSPXSLSLSPGQRATLSCRASQSLISSYLAWYQQKPGQAPRLLIYGASSRATGIPDRFSGSGSGTDFTLTISRLEPEDFVVYYCQQYGGSIPTFGGGTKVESK

SEQ ID NO: 12420 - protein, 9 aa, Artificial Sequence
  Synthetic
QQYGGSIPT

SEQ ID NO: 12421 - protein, 124 aa, Artificial Sequence
  Synthetic
QVQLVQSGAEVKKPGSSVKVSCKASGGTFSNYAISWMRQAPGQGLEWMGGIIPVFGSSTYAQNFRGRVTITADESTRTAYLELISLTSGDTAVYYCARGHLGEIRWENYALDYWGQGTLVTVSS

SEQ ID NO: 12422 - protein, 17 aa, Artificial Sequence
  Synthetic
ARGHLGEIRWENYALDY

SEQ ID NO: 12423 - protein, 105 aa, Artificial Sequence
  Synthetic
SYVLTQPPSVSVSPGQTARITCSGDSFPNKYAYWYQQKSGQAPVLVIYEDSKRPSGIPERFSGSSSGTMAALTISGAQVDDEADYYCYSTDSSGGVFGGGTKLTV

SEQ ID NO: 12424 - protein, 9 aa, Artificial Sequence
  Synthetic
YSTDSSGGV

SEQ ID NO: 12425 - protein, 117 aa, Artificial Sequence
  Synthetic
EVQLVESGGGLIQPGGSLRLSCAASGLTVSSNYMSWVRQAPGKGLEWVSVIFPGGSTFHADFVKGRFTISRDNSKNTLYLQMNSLRVEDTAVYYCARDMYEGAFDIWGQGTMVTVSS

SEQ ID NO: 12426 - protein, 11 aa, Artificial Sequence
  Synthetic
ARDMYEGAFDI

SEQ ID NO: 12427 - protein, 108 aa, Artificial Sequence
  Synthetic
DIQLTQSPSSLSASVGDRVTITCRASQGIASYLAWYQQKPGKAPNLLIYAASALQSGVPSRFSGSGSGTEFTLTISSLQPEDFATYYCQQLNSYPRLTFGGGTKVEIK

SEQ ID NO: 12428 - protein, 10 aa, Artificial Sequence
  Synthetic
QQLNSYPRLT

SEQ ID NO: 12429 - protein, 117 aa, Artificial Sequence
  Synthetic
QVQLQESGPGLVKPSETLSVTCTVSGDSISRHYWSWIRQPPGKGLEWIGYMYSGVSTDYNPSLKSRVTISGDTSKNHFSLKMRSVTATDTAVYFCAKSFTPYYFDLWGQGSLVTVSS

SEQ ID NO: 12430 - protein, 11 aa, Artificial Sequence
  Synthetic
AKSFTPYYFDL

SEQ ID NO: 12431 - protein, 111 aa, Artificial Sequence
  Synthetic
QSVLTQPPSVSGAPGQRVTISCTGSSSNIGAGFDVHWYQQLPGTAPKLLIYGTNSRPSGVPDRFSGSKSGTSASLAITGLQVEDEADYYCQSYDSNLSAPYVFGTGTKVTV

SEQ ID NO: 12432 - protein, 12 aa, Artificial Sequence
  Synthetic
QSYDSNLSAPYV

SEQ ID NO: 12433 - protein, 122 aa, Artificial Sequence
  Synthetic
QVQLVQSGAEVKKPGASVKVSCRASGYTFTSNYIHWVRQAPGQGLEWMGMINPSVGSVKYAQQFQARVTMTTDTSTSTVYMALRSLRSEDTAVYYCARAWAYIPASGPGDYWGQGTLVTVSS

SEQ ID NO: 12434 - protein, 15 aa, Artificial Sequence
  Synthetic
ARAWAYIPASGPGDY

SEQ ID NO: 12435 - protein, 107 aa, Artificial Sequence
  Synthetic
DIQMTQSPVSLSASVGDRVTITCRASQSISTWLAWYQQKPGKAPKLLIYKASSLESGVPSRFSGSGSGTEFTLTISSLQPDDFAAYYCQHYNSYSPWTFGQGTKVEI

SEQ ID NO: 12436 - protein, 10 aa, Artificial Sequence
  Synthetic
QHYNSYSPWT

SEQ ID NO: 12437 - protein, 130 aa, Artificial Sequence
  Synthetic
EVQLVESGGGLVQSGGSLRLSCAASGFSFSSYDMHWVRQAPGKGLEWLSVIGTAGDSYYPGSVKGRFTISRENAKNSVYLQMNSLRAGDTAVYYCARGDSSLEYNSSSLRGYHYYYMDVWGKGTTVTVSS

SEQ ID NO: 12438 - protein, 24 aa, Artificial Sequence
  Synthetic
ARGDSSLEYNSSSLRGYHYYYMDV

SEQ ID NO: 12439 - protein, 108 aa, Artificial Sequence
  Synthetic
DIQMTQSPSSLSASVGDRVTITCRASQSISRYLNWYQQKPGKPPKLLIYAASTLQSGVPSRFSGSGSGTDFTLTISNLQPEDFATYHCQQSYTTLGYTFGQGTKVEIK

SEQ ID NO: 12440 - protein, 10 aa, Artificial Sequence
  Synthetic
QQSYTTLGYT

SEQ ID NO: 12441 - protein, 121 aa, Artificial Sequence
  Synthetic
EVQLVESGGGLVQPGGSLRLSCSASGFTFSSYAMHWVRQAPGKGLEYVSGIIINGGSTDYTDSVKGRFTISRDNSKNTLYLQMSSLRVEDTAVYYCVKDHSSSSGDYFDYWGQGTLVTVSS

SEQ ID NO: 12442 - protein, 14 aa, Artificial Sequence
  Synthetic
VKDHSSSSGDYFDY

SEQ ID NO: 12443 - protein, 109 aa, Artificial Sequence
  Synthetic
SYVLTQPPSVSVAPGRTARITCGGNNIGNKSVHWYKQKPGQAPLLVIFYDSDRPSGIPERFSGSNSGNTATLTISRVEAGDEADYYCQVWDGTSDHHYVFGAGTKVTVL

SEQ ID NO: 12444 - protein, 12 aa, Artificial Sequence
  Synthetic
QVWDGTSDHHYV

SEQ ID NO: 12445 - protein, 122 aa, Artificial Sequence
  Synthetic
QVQLVQSGAEVKKPGSAVKVSCKASGVIFNSYTFIWVRQAPGQGLEWMGGIIPNIDTANYAQKFQGRVTISADKSTSTAYMELSSLRFEDTAVYFCARSPPAGSTEYYMDVWGKGTTVTVSS

SEQ ID NO: 12446 - protein, 15 aa, Artificial Sequence
  Synthetic
ARSPPAGSTEYYMDV

SEQ ID NO: 12447 - protein, 107 aa, Artificial Sequence
  Synthetic
SYVLTQPPSVSVAPGKTARITCGGNNIGSKNVHWYQQRPGQAPVLVIYYDRDRPSGIPERFSGSNSGNTATLIISRVEAGDEADYYCQVWDSSSDSVVFGGGTKLTV

SEQ ID NO: 12448 - protein, 11 aa, Artificial Sequence
  Synthetic
QVWDSSSDSVV

SEQ ID NO: 12449 - protein, 123 aa, Artificial Sequence
  Synthetic
QVQLVESGGGVVQPGRSLRLSCAASGFTFSSSTMHWVRQTPGKGLEWVAVISYDGSNKYFADSVKGRFTISRDNSKNTLYLQMNRLRAEDTAVYFCAREWGYLGYERTPFDYWGQGTLLTVSS

SEQ ID NO: 12450 - protein, 16 aa, Artificial Sequence
  Synthetic
AREWGYLGYERTPFDY

SEQ ID NO: 12451 - protein, 108 aa, Artificial Sequence
  Synthetic
DIQMTQSPSTLSASVGDRVTITCRASQSISRWLAWYQQKPGKAPKLLIYKASSLESGVPSRFSGSGSGTEFTLTISSLQPDDFATYYCQQYNSYSEYTFGQGTKLEIK

SEQ ID NO: 12452 - protein, 10 aa, Artificial Sequence
  Synthetic
QQYNSYSEYT

SEQ ID NO: 12453 - protein, 119 aa, Artificial Sequence
  Synthetic
QVQLVESGGGVVQPGKSLRLSCAASGFSFSSYFMHWVRQAPGKGLEWVAVISSDRSTKYYADSVKGRFPISRDNSKNTVYLQMNSLKVEDTAVYYCARSPWLRGAFDFWGQGTLVTVSS

SEQ ID NO: 12454 - protein, 12 aa, Artificial Sequence
  Synthetic
ARSPWLRGAFDF

SEQ ID NO: 12455 - protein, 110 aa, Artificial Sequence
  Synthetic
NFVLTQPHSVSESPGKTVTISCTGSSGSIANNYVQWYQQRPGGAPTTVISEDNQRPSGVPDRFSGSIDSSSNSASLTISGLKTEDEADYYCQSYDSTKWVFGGGTKLTVL

SEQ ID NO: 12456 - protein, 9 aa, Artificial Sequence
  Synthetic
QSYDSTKWV

SEQ ID NO: 12457 - protein, 122 aa, Artificial Sequence
  Synthetic
EVQLLESGGGLVQPGGSLRLSCAASGFTFSSFAMSWVRQAPGKGLEWVSSISGSGGGTFYADSVKGRFTISRDNSKNTLYLQMNSLRAEDTAVYYCAKDIGATLTTECFDYWGQGTLVTVSS

SEQ ID NO: 12458 - protein, 15 aa, Artificial Sequence
  Synthetic
AKDIGATLTTECFDY

SEQ ID NO: 12459 - protein, 108 aa, Artificial Sequence
  Synthetic
DIQMTQSPSSLSASVGDRVTITCRASQSISSYLNWYQQKPGKAPRLLIYAASSLQSGVPSRFSGSGSGTDFTLTISSLQPEDFATYYCQQSYSTPPSTFGQGTKLEIK

SEQ ID NO: 12460 - protein, 10 aa, Artificial Sequence
  Synthetic
QQSYSTPPST

SEQ ID NO: 12461 - protein, 122 aa, Artificial Sequence
  Synthetic
QVQLVQSGAEVKKPGSAVKVSCKASGVTFNSYSFIWVRQAPGQGLEWMGGIIPSIGTTNYAQRFRGRVTISADTSTTTAYMELSSLRSEDTAVYYCARSPPAGSTEYYMDLWGKGTTVTVSS

SEQ ID NO: 12462 - protein, 15 aa, Artificial Sequence
  Synthetic
ARSPPAGSTEYYMDL

SEQ ID NO: 12463 - protein, 107 aa, Artificial Sequence
  Synthetic
SYVLTQPPSVSVAPGKTARITCGGNNIGSKNVHWYQQRPGQAPVLVIYYESDRPSGIPERFSGSNSGNTATLIISRVEAGDEADYYCQVWDSSSDSVVFGGGTKLTV

SEQ ID NO: 12464 - protein, 11 aa, Artificial Sequence
  Synthetic
QVWDSSSDSVV

SEQ ID NO: 12465 - protein, 120 aa, Artificial Sequence
  Synthetic
QVQLVESGGGVVQPGRSLRLSCAASGFSFSNYAMHWVRQAPGKGLEWVAVIWYDGSHKFYADSVKGRFTISRDNSKNTVNLQMNSLRAEDTAVYYCARDYGSLTTHFDYWGQGTLVTVSS

SEQ ID NO: 12466 - protein, 13 aa, Artificial Sequence
  Synthetic
ARDYGSLTTHFDY

SEQ ID NO: 12467 - protein, 108 aa, Artificial Sequence
  Synthetic
DIQMTQSPSSLSASVGDRVTITCRASQSIRSDLNWYQQKPGKAPNLLIYAASSLQSGVPSRFSGSGSGTDFTLTISSLQPEDFATYYCQQSYSTPPWTFGQGTKVEVK

SEQ ID NO: 12468 - protein, 10 aa, Artificial Sequence
  Synthetic
QQSYSTPPWT

SEQ ID NO: 12469 - protein, 120 aa, Artificial Sequence
  Synthetic
EVQLLESGGGLVQPGGSLRLSCAASGFTFSSYAMSWVRQAPGKGLEWVSGISGSGGARNYADALEGRFTISRDNSKNTLYLQIDSLRAEDTALYYCAKLGTLGASGPDYWGQGTLVSVSS

SEQ ID NO: 12470 - protein, 13 aa, Artificial Sequence
  Synthetic
AKLGTLGASGPDY

SEQ ID NO: 12471 - protein, 105 aa, Artificial Sequence
  Synthetic
DIQMTQSPSSLSASVRDRVTITCRASQNIGTNLNWYQQKPGTAPKLLIYAASSLQSGVPSRFSGSGSGTDFTLTISSLQPEDFATYYCQQNYSWWTFGGGTRVEI

SEQ ID NO: 12472 - protein, 8 aa, Artificial Sequence
  Synthetic
QQNYSWWT

SEQ ID NO: 12473 - protein, 128 aa, Artificial Sequence
  Synthetic
QVQLQESGPGLVKPSETLSVTCSVSGDSMNNYYWTWIRQSPGKGLEWIGYISDRESATYNPSLNSRVVISRDTSKNQLSLKLNSVTPADTAVYYCATARRGQRIYGVVSFGEFFYYYSMDVWGKGTTV

SEQ ID NO: 12474 - protein, 26 aa, Artificial Sequence
  Synthetic
ATARRGQRIYGVVSFGEFFYYYSMDV

SEQ ID NO: 12475 - protein, 107 aa, Artificial Sequence
  Synthetic
DIQMTQSPSSLSASVGDRVTIACRASHNIRTYLNWYQQKPGMPPELLIRAASNLQSGVPSRFSGSGSGTDFSLTISGLQPEDFATYYCQQSFTTPRTFGQGTKVEIK

SEQ ID NO: 12476 - protein, 9 aa, Artificial Sequence
  Synthetic
QQSFTTPRT

SEQ ID NO: 12477 - protein, 116 aa, Artificial Sequence
  Synthetic
EVQLVESGGGLIQPGGSLRLSCAASEIIVSSNYMSWVRQAPGKGLEWVSLIYPGGTTYYADSVKGRFIISRDNSKNTLYLQMNSLRAEDTAIYYCARDLGDYSDYWGQGTLVTVAS

SEQ ID NO: 12478 - protein, 10 aa, Artificial Sequence
  Synthetic
ARDLGDYSDY

SEQ ID NO: 12479 - protein, 108 aa, Artificial Sequence
  Synthetic
SYVLTQPPSVSVAPGKTARITCGGNNIGSKSVHWYQQKPGQAPVLVVYDGSDRPSGIPERFSGSISGNTATLTISRVEVGDEADYYCQMWDSTSDHRVFGGGTKLTVL

SEQ ID NO: 12480 - protein, 11 aa, Artificial Sequence
  Synthetic
QMWDSTSDHRV

SEQ ID NO: 12481 - protein, 122 aa, Artificial Sequence
  Synthetic
QLQLQESGPGLVKPSETLSLTCSVSGGSIGGYSYYWGWIRQPPGKGLESIGSIYYTGSTYYNPSLKSRVTISVDTSKNQFSLKLSSVTAADTAVYYCARQYQDYYGSSGFDPWGQGALVTVS

SEQ ID NO: 12482 - protein, 15 aa, Artificial Sequence
  Synthetic
ARQYQDYYGSSGFDP

SEQ ID NO: 12483 - protein, 107 aa, Artificial Sequence
  Synthetic
DIQMTQSPVSLSASVGDRVTITCRASQSISNYLNWYQQKPGKAPKLLIYLASTLQSGVPSRFSSGGSGTDFTLTISSLQPGDFATYYCQQSYTNPGTFGPGTKVEVK

SEQ ID NO: 12484 - protein, 9 aa, Artificial Sequence
  Synthetic
QQSYTNPGT

SEQ ID NO: 12485 - protein, 120 aa, Artificial Sequence
  Synthetic
QVQLQESGPGLVQPSGTLSLTCGVSSASISSSNWWSWVRQSPEKGLQWIGEIYHSGSPTYNPSLQSRVTISLDRSKNHFSLKLTSVTAADTAVYYCAKRPLTDFYYMDVWGKGTTVTVSS

SEQ ID NO: 12486 - protein, 13 aa, Artificial Sequence
  Synthetic
AKRPLTDFYYMDV

SEQ ID NO: 12487 - protein, 107 aa, Artificial Sequence
  Synthetic
DIQMTQSPVSLSASVGDRVTITCRASQSVGSYLNWYLQKPGRAPKLLIFAASNLQTGVPSRFSGSGSGTDFTLTISSLQPEDFATYYCQQSYTFPLTFGGGTKVEIK

SEQ ID NO: 12488 - protein, 9 aa, Artificial Sequence
  Synthetic
QQSYTFPLT

SEQ ID NO: 12489 - protein, 122 aa, Artificial Sequence
  Synthetic
QLQLQESGPGLVKPSETLSLTCNVSGGSISSSNHYWAWVRQPPGKGLEWIGSIFYSGITYYNPSLKSRVTISVDTSKNQFSLGLRSVPAADTAVYYCAREIRVIPSRSFDYWGQGALVTVSS

SEQ ID NO: 12490 - protein, 14 aa, Artificial Sequence
  Synthetic
AREIRVIPSRSFDY

SEQ ID NO: 12491 - protein, 109 aa, Artificial Sequence
  Synthetic
QSVLTQPASVSGSPGQSITISCTGTSSDVGSYDLVSWYQQHPGKAPQLMIYAVSERPSGISNRFSGSKSGNTASLTISALQAEDEADYYCCSYAGNIRVFGGGTKVTVL

SEQ ID NO: 12492 - protein, 9 aa, Artificial Sequence
  Synthetic
CSYAGNIRV

SEQ ID NO: 12493 - protein, 118 aa, Artificial Sequence
  Synthetic
QVQLQESGPGLVKPSGTLSLTCTVSGGSINTYYWRWIRQAPGKGLEWIGYMYDSGRTNYNPSLKSRVTISVDTSKNQFSLKLSSVTAADTALYYCARTEWLRGHIDYWGQGALVTVSS

SEQ ID NO: 12494 - protein, 12 aa, Artificial Sequence
  Synthetic
ARTEWLRGHIDY

SEQ ID NO: 12495 - protein, 111 aa, Artificial Sequence; identical to SEQ ID NO: 11767
  Synthetic

SEQ ID NO: 12496 - protein, 10 aa, Artificial Sequence
  Synthetic
QSFDSSVNWV

SEQ ID NO: 12497 - protein, 119 aa, Artificial Sequence
  Synthetic
EVQLVESGGGLIQPGGSLRLSCAASVFTVSRNYMSWVRQAPGKGLEWVSLIYSGGSTYYADSVKGRFTISRDNSKNTLYLQMNSLRVEDTAVYYCARALPMNWLYFDYWGQGTLVTVSS

SEQ ID NO: 12498 - protein, 13 aa, Artificial Sequence
  Synthetic
ARALPMNWLYFDY

SEQ ID NO: 12499 - protein, 112 aa, Artificial Sequence
  Synthetic
QSVLTQPPSVSGAPGQRVTISCTGSSSIIGAGYDVHWYQQLPGTAPKLLIYGNTNRPSGVPDRFSGSQSGTSASLAITGLQAEDEADYYCQSYDSSLSGSVVFGGGTKLTVL

SEQ ID NO: 12500 - protein, 12 aa, Artificial Sequence
  Synthetic
QSYDSSLSGSVV

SEQ ID NO: 12501 - protein, 126 aa, Artificial Sequence
  Synthetic
QVQLVESGGGVVQPGRSLRLSCAASGFTFSSYGMHWVRQAPGKGLEWVAVISYDGRNKHYADSVKGRFTISRDNSKNTVFLQMNSLRAEDTAVYYCAKNMIQLWLNPEGVDAFDFWGQGTMVTVSS

SEQ ID NO: 12502 - protein, 19 aa, Artificial Sequence
  Synthetic
AKNMIQLWLNPEGVDAFDF

SEQ ID NO: 12503 - protein, 108 aa, Artificial Sequence
  Synthetic
DIQMTQSPSSLSASVGDRVTITCRTSQSIDWYLNWYQQKPGKAPKLLIYGASSLQSGVPSRFSGSGSGTDFTLTISSLQPEDFATYYCHQSFSTPMFTFGQGTKLEIK

SEQ ID NO: 12504 - protein, 10 aa, Artificial Sequence
  Synthetic
HQSFSTPMFT

SEQ ID NO: 12505 - protein, 120 aa, Artificial Sequence
  Synthetic
QVQLVESGGGVVQPERSLRLSCAASGFTFVNYGMHWVRQAPGKGLEWVAVIWSDGSGKHYADSVKGRFTISRDNSKNTLYLQMNSLRADDTAVYYCARDYGAMVTHFDSWGQGTLVTVSS

SEQ ID NO: 12506 - protein, 13 aa, Artificial Sequence
  Synthetic
ARDYGAMVTHFDS

SEQ ID NO: 12507 - protein, 108 aa, Artificial Sequence
  Synthetic
DIQMTQSPSSLSASVGDRVTITCRASQSITNYLNWYQQKPGKAPKLLIYDASSLQSGVPLRFSGSGSGTDFTLTISSLQPEDFATYYCQQSYSTPPWTFGQGTKVEIK

SEQ ID NO: 12508 - protein, 10 aa, Artificial Sequence
  Synthetic
QQSYSTPPWT

SEQ ID NO: 12509 - protein, 127 aa, Artificial Sequence
  Synthetic
QVQLQESGPGLVKSSQTLSLTCTVSGGSISSGGDYWSWIRQHPRKGLEWIGYINFSGSTSYNPSLKSRVTISVDTSKNQFSLRLTSVTAADTAVYYCARTYYYDSSGNYFQYYFDSWGQGTLVTVSS

SEQ ID NO: 12510 - protein, 19 aa, Artificial Sequence
  Synthetic
ARTYYYDSSGNYFQYYFDS

SEQ ID NO: 12511 - protein, 108 aa, Artificial Sequence
  Synthetic
EIVLTQSPGTLSLSPGERATLSCRATHSVSSSYLAWYQQIPGQAPRLLIYGASSRATGIPDRFSGSGSGTDFTLTISRLEPEDFAVYYCQQYAFSPLTFGGGTKVEIK

SEQ ID NO: 12512 - protein, 9 aa, Artificial Sequence
  Synthetic
QQYAFSPLT

SEQ ID NO: 12513 - protein, 122 aa, Artificial Sequence
  Synthetic
EVQLLESGGGLVQPGGSLRLSCAASGFTFSNYAMSWVRQAPGKGLEWVSAISSGGGIPTYADSVKGRFTISRDNSKNTLYLQMNSLRAEDTAVYYCAKDFGRELLFDVFDIWGQGTMVTVSS

SEQ ID NO: 12514 - protein, 15 aa, Artificial Sequence
  Synthetic
AKDFGRELLFDVFDI

SEQ ID NO: 12515 - protein, 108 aa, Artificial Sequence
  Synthetic
DIQMTQSPSSLSASVGDRVTITCRASQSINNYLNWYQQKPGKAPKLLIYAASSLQSGVPSRFSGSGSGTDFTLTISSLQPEDFAAYFCQQSYSTPPLTFGGGTKVEIK

SEQ ID NO: 12516 - protein, 10 aa, Artificial Sequence
  Synthetic
QQSYSTPPLT

SEQ ID NO: 12517 - protein, 125 aa, Artificial Sequence
  Synthetic
QVQLVQSGAEVKKPGSSVKVSCEASGGTFNNYAISWVRQAPGQGLEWMGRIIANFGMANYAQKFQGRVSITADKSTSTAYMELSSLTSEDTAVYYCATWGEFMKPGGGGQGFDYWGQGTLVTVSS

SEQ ID NO: 12518 - protein, 18 aa, Artificial Sequence
  Synthetic
ATWGEFMKPGGGGQGFDY

SEQ ID NO: 12519 - protein, 107 aa, Artificial Sequence
  Synthetic
DIQMTQSPSSLSASEGDRVTITCRASQSISSYLNWYQQKPGKAPKLLIYGALSLQSGVPSRFSGSGSGTDFTLTISSLQPEDFATYYCQQSYSAPLTFGQGTRVEIK

SEQ ID NO: 12520 - protein, 9 aa, Artificial Sequence
  Synthetic
QQSYSAPLT

SEQ ID NO: 12521 - protein, 118 aa, Artificial Sequence
  Synthetic
QVQLVESGGGVVQPGRSLRLSCAASGFTFSTYGMHWVRQAPGKGLEWVAIIWSDGSNKFYADSVMGRFTISRDNSKNTLYLEMNSLRVEDTAVYYCARGMAAGAKDYWGQGTLVTVSS

SEQ ID NO: 12522 - protein, 11 aa, Artificial Sequence
  Synthetic
ARGMAAGAKDY

SEQ ID NO: 12523 - protein, 108 aa, Artificial Sequence
  Synthetic
SYVLTQAPSMSVAPGKTARITCGGNSIGTKSVHWYQQKPGQAPVLVIYYDSDRPSGIPERFSGSNSGNTATLTISRVEAGDEADYYCQVSDSSSEHVVFGGGTKLTVL

SEQ ID NO: 12524 - protein, 11 aa, Artificial Sequence
  Synthetic
QVSDSSSEHVV

SEQ ID NO: 12525 - protein, 129 aa, Artificial Sequence
  Synthetic
EVQLVESGGVVVQPGGSLRLSCAASGFTFDDYTMHWVRQAPGKGLEWVSLINWDGGSPSYADSVKGRFTISRDNSKNSLYLQMNSLRTEDTALYYCAKDFRCSSARCQGGYSSGWFDSWGQGTLVTVSS

SEQ ID NO: 12526 - protein, 22 aa, Artificial Sequence
  Synthetic
AKDFRCSSARCQGGYSSGWFDS

SEQ ID NO: 12527 - protein, 105 aa, Artificial Sequence
  Synthetic
SYVLTQPPSVSVAPGETARITCGGDSIGSKSVHWYQQKPGQAPVVVIYYDNDRPSGIPERFSGSNSGNTATLTISRVEAGDEADYYCQVWDIGVVFGGGTKLTVL

SEQ ID NO: 12528 - protein, 8 aa, Artificial Sequence
  Synthetic
QVWDIGVV

SEQ ID NO: 12529 - protein, 127 aa, Artificial Sequence
  Synthetic
QLQLQESGPGLVKPSETLSLTCTVSGGSISSSYHWAWIRQPPGKGLEWIGIIHYRGTTNYSPSLKSRVNISVDSSKNQFSLRLTSVTAADTAVYYCARVTPEYITVVLDIDYYIDVWGKGTTVTASS

SEQ ID NO: 12530 - protein, 20 aa, Artificial Sequence
  Synthetic
ARVTPEYITVVLDIDYYIDV

SEQ ID NO: 12531 - protein, 110 aa, Artificial Sequence
  Synthetic
QSVLTQPPSASGTPGQRVTISCSGSNSNIGSNYVYWYQQLPGTAPKPLIYRNDQRPSGVPDRFSGSKSGTSASLAISGLRSEDEADYYCAAWDDSLSGRVFGGGTKLTVL

SEQ ID NO: 12532 - protein, 11 aa, Artificial Sequence
  Synthetic
AAWDDSLSGRV

SEQ ID NO: 12533 - protein, 121 aa, Artificial Sequence
  Synthetic
QVQLQESGPGLVKPSQTLSLTCTVSGVSIGRPGFHWSWIRQHPGKGLEWIGYIDYSGSAYYSPPLKSRVTMSLDTSKNQFSLDLSSVTDADTAVYYCARIQGVGIGWFDPWGQGTLLIVSS

SEQ ID NO: 12534 - protein, 13 aa, Artificial Sequence
  Synthetic
ARIQGVGIGWFDP

SEQ ID NO: 12535 - protein, 108 aa, Artificial Sequence
  Synthetic
SYVLTQPPSVSVAPGKTARITCGGDNIRSKSVHWYQEKPGQAPVLVIYYDSDRPSGIPERFSGSNSENTATLTISSVEAGDEADYYCQVWDTTSDHPVFGGGTKLTVL

SEQ ID NO: 12536 - protein, 11 aa, Artificial Sequence
  Synthetic
QVWDTTSDHPV

SEQ ID NO: 12537 - protein, 128 aa, Artificial Sequence
  Synthetic
  misc_feature (57)..(57): Xaa can be any naturally occurring amino acid
QVQLQESGPGLVKPSQTLSLTCTVSGGSFSSGDYYWSWVRQPPGRGLEWIGYIFHTXITYYNPSLKSRLTISIDTSKRQFSLRLSSVTAADTAVYYCARFTTRYCSGGSCYSKTFDSWGQGTLVTVSS

SEQ ID NO: 12538 - protein, 20 aa, Artificial Sequence
  Synthetic
ARFTTRYCSGGSCYSKTFDS

SEQ ID NO: 12539 - protein, 110 aa, Artificial Sequence
  Synthetic
QSVLTQPASVSGSPGQSITISCTGTSSDVGSYDLVSWYQQYPGKAPRLIIYEVTERPSGVSNRFSGSKSGNAASLTISGLQAEDEANYYCCSYAGATTLLFGGGTSLTVL

SEQ ID NO: 12540 - protein, 10 aa, Artificial Sequence
  Synthetic
CSYAGATTLL

SEQ ID NO: 12541 - protein, 125 aa, Artificial Sequence
  Synthetic
QVQLVESGGGVVQPGRSLRLSCAASGFNFSNYAMYWVRQAPGKGLEWGAVISSDGSNNYYTDSVKGRFTISRDNSENTLYLQMNSLRTEDTAVYYCARSHSSSWYWGLADAFDLWGQGTMVTVSS

SEQ ID NO: 12542 - protein, 18 aa, Artificial Sequence
  Synthetic
ARSHSSSWYWGLADAFDL

SEQ ID NO: 12543 - protein, 107 aa, Artificial Sequence
  Synthetic
DIQMTQSPSSLSASVGDRVTITCRASQSISSYLNWYQQKPGKAPNLLIYDASSLQSGVPSRFSGSGFGTDFTLTISSLQPEDFASYFCQESYTTPQTFGQGTRVEVK

SEQ ID NO: 12544 - protein, 9 aa, Artificial Sequence
  Synthetic
QESYTTPQT

SEQ ID NO: 12545 - protein, 117 aa, Artificial Sequence
  Synthetic
QVQLQESGPGLVKPSETLSVTCTVSGDSISRHYWSWIRQPPGKGLEWIGYMYSGVSTDYNPSLKSRVTISVDTSKNHFSLKLRSVTATDTAVYFCAKSFTPYYFDLWGQGSLVTVSS

SEQ ID NO: 12546 - protein, 11 aa, Artificial Sequence
  Synthetic
AKSFTPYYFDL

SEQ ID NO: 12547 - protein, 111 aa, Artificial Sequence
  Synthetic
QSVLTQPPSVSGAPGQRVTISCTGSSSNIGAGFDVHWYQQLPGTAPKLLIYGTNNRPSGVPDRFSGSKSGTSASLAITGLQAEDEADYYCQSYDSNLSAPYVFGTGTKVTV

SEQ ID NO: 12548 - protein, 12 aa, Artificial Sequence
  Synthetic
QSYDSNLSAPYV

SEQ ID NO: 12549 - protein, 126 aa, Artificial Sequence
  Synthetic
QLQLQESGPGLVKPSETLSLICSVSSGPISGSSYYWGWIRQPPGKGLEWIGSIYYSGSTYYNPSLKSRVTISVDTSKNQFSLKLSSVTAADTAVYYCTRDSTYYYASGSVYPPDSWGQGTLVTVSS

SEQ ID NO: 12550 - protein, 18 aa, Artificial Sequence
  Synthetic
TRDSTYYYASGSVYPPDS

SEQ ID NO: 12551 - protein, 108 aa, Artificial Sequence
  Synthetic
EIVLTQSPATLSLSPGERATLSCRASQSVSSYLAWYQQKPGQAPRLLIYDASNRATGIPARFSGSGSGTDFTLTISSLEPEDFAVYYCQQRSNWPRITFGQGTRLEIK

SEQ ID NO: 12552 - protein, 10 aa, Artificial Sequence
  Synthetic
QQRSNWPRIT

SEQ ID NO: 12553 - protein, 125 aa, Artificial Sequence
  Synthetic
QLQLQESGPGLVKPSETLSLTCTVSGGSISSSSYYWGWIRQPPGKGLDWIASVFYSGITYSNPSLKSRVTISVDTSKNQFSLKLTSVTAADTAVYYCARVVRNCNSNTCYEVDYWGQGTLVTVSS

SEQ ID NO: 12554 - protein, 17 aa, Artificial Sequence
  Synthetic
ARVVRNCNSNTCYEVDY

SEQ ID NO: 12555 - protein, 110 aa, Artificial Sequence
  Synthetic
QSVLTQPASVSGSRRQSITISCTGTSSDIGSYSFVSWYQHHPGKAPKLILYEVNKRPSGVSDRFSGSKSGNTASLTISGLQAEDEADYHCCSYVGSGTLIFGGGTKLTVL

SEQ ID NO: 12556 - protein, 10 aa, Artificial Sequence
  Synthetic
CSYVGSGTLI

SEQ ID NO: 12557 - protein, 117 aa, Artificial Sequence
  Synthetic
QVQLQESGPGLVKPSETLSLTCSVSGGSMNGYYWTWIRQAPGKGLEWIGYIYHSGSPNYNPALRSRVSISVDMSKNQFSLKVNSVTAADTAVYYCAKEGTTGYYEYWGQGTLVTVSS

SEQ ID NO: 12558 - protein, 11 aa, Artificial Sequence
  Synthetic
AKEGTTGYYEY

SEQ ID NO: 12559 - protein, 108 aa, Artificial Sequence
  Synthetic
EIVLTQSPGTLSLSPGERATLSCRASQSLISSYLAWYQQKPGQAPRLLIYGASSRATGIPDRFSGSGSGTDFTLTISRLEPEDFAVYYCQQYGGSIPTFGGGTKVESK

SEQ ID NO: 12560 - protein, 9 aa, Artificial Sequence
  Synthetic
QQYGGSIPT

SEQ ID NO: 12561 - protein, 124 aa, Artificial Sequence
  Synthetic
QVQLVQSGAEVKKPGASVKVSCKASGYTFTSYFIHWVRQAPGQGLEWMGIINPSSGGASYTQRFQGRVTMTRDTSTSTVYMELSSLRSDDTAVYYCARMRSDGVPEWELLTDYWGQGTLVTVSS

SEQ ID NO: 12562 - protein, 17 aa, Artificial Sequence
  Synthetic
ARMRSDGVPEWELLTDY

SEQ ID NO: 12563 - protein, 108 aa, Artificial Sequence
  Synthetic
QSVLTQPPSASGTPGQRVTISCSGSSSNIGSNYVYWFQQLPGTAPKLLIYRNNQRPSGVPDRFSGSKSGTSASLAISGLRSEDEADYYCAAWDVSLYVFGTGTKVTVL

SEQ ID NO: 12564 - protein, 9 aa, Artificial Sequence
  Synthetic
AAWDVSLYV

SEQ ID NO: 12565 - protein, 121 aa, Artificial Sequence
  Synthetic
QVQLVESGGGVVQPGRSLRLSCAASGLPFSVFGMHWVRQAPGKGLEWVAVMSSDGSNKYYGDSVKGRFTISRDNSKNTLYLQMNSLRVEDTAVYYCAKDIDGSGSWFMDVWGEGTTVTVSS

SEQ ID NO: 12566 - protein, 14 aa, Artificial Sequence
  Synthetic
AKDIDGSGSWFMDV

SEQ ID NO: 12567 - protein, 108 aa, Artificial Sequence
  Synthetic
SYVLTQPPSVSVAPGKTATITCGGNNIGSKSVFWYQQKPGQAPVLVIYYDSDRPSGIPDRFSGSNSGNTATLTISRVEAGDEADYYCQVWDSDSDHVVFGGGTKLTVL

SEQ ID NO: 12568 - protein, 11 aa, Artificial Sequence
  Synthetic
QVWDSDSDHVV

SEQ ID NO: 12569 - protein, 127 aa, Artificial Sequence
  Synthetic
QVQLVQSGAEVKKPGASVKVSCKASGYTFTSYYMHWVRQAPGQGLEWMGIINPSGGSTTYAQKFQGRVTMTRDTSTSTVYMEVSSLRFGDTAVYYCARDRGYCTTTSCSPHDAFDIWGQGTMVTVSS

SEQ ID NO: 12570 - protein, 20 aa, Artificial Sequence
  Synthetic
ARDRGYCTTTSCSPHDAFDI

SEQ ID NO: 12571 - protein, 108 aa, Artificial Sequence
  Synthetic
SYVLTQPPSVSVAPGKTARITCGGDDIGAKSVHWYQQKPGQAPVLVVYDDSDRPSGIPERFSGSNSGNTATLTISRVEAGDEADYYCQVWDGSGALYYVFGTGTKVTV

SEQ ID NO: 12572 - protein, 12 aa, Artificial Sequence
  Synthetic
QVWDGSGALYYV

SEQ ID NO: 12573 - protein, 123 aa, Artificial Sequence
  Synthetic
QVQLVESGGGIVQPWRSLRLSCAASGFTFTNYAMHWVRQAPGKGLEWVAGISSDGTIRYYADSVKGRFTIFRDNSKNTLYMQMNNLSVDDTAVYYCARESDPETTVTTEFDYWGQGTLVTVSS

SEQ ID NO: 12574 - protein, 16 aa, Artificial Sequence
  Synthetic
ARESDPETTVTTEFDY

SEQ ID NO: 12575 - protein, 108 aa, Artificial Sequence
  Synthetic
DIQMTQSPSSLSASVGDRVTITCRASQSISNYLNWYQQKPGKAPSLLIYAASSLQSGVPARFSGSGSGTDFTLTISSLQPEDFATYYCQQSYSTPPITFGQGTRLEIE

SEQ ID NO: 12576 - protein, 10 aa, Artificial Sequence
  Synthetic
QQSYSTPPIT

SEQ ID NO: 12577 - protein, 122 aa, Artificial Sequence
  Synthetic
QLQLQESGPGLVKPSETLSLTCTVSGGSISSSTYYWGWIRQPPGKGLEWIGHIYYSGITYDNPSLKSRVTISVDTSKNQFSLRLSSVTAADTAVYYCASLLRVAPYYSFDYWGLGTQVTVSS

SEQ ID NO: 12578 - protein, 14 aa, Artificial Sequence
  Synthetic
ASLLRVAPYYSFDY

SEQ ID NO: 12579 - protein, 109 aa, Artificial Sequence
  Synthetic
QSVLTQPPSASGSPGQSVTISCTGSSSDVGGYDYVSWYQKHPGKAPKLMIYEVSKRPSGVPDRFSGSKSGNTASLTVSGLQAEDEADYFCSSYAGSNVLFGGGTKLTVL

SEQ ID NO: 12580 - protein, 9 aa, Artificial Sequence
  Synthetic
SSYAGSNVL

SEQ ID NO: 12581 - protein, 121 aa, Artificial Sequence
  Synthetic
EVQLVQSGAEVKKPGESLRISCKVSGYSFTNYWISWVRQMPGKGLEWMGRIDPSDSDTDYSPSFQGHVTVSADKSIYTAYLHWSSLKASDTAIYYCAREAVVIAATHLDYWGQGTLVTVSS

SEQ ID NO: 12582 - protein, 14 aa, Artificial Sequence
  Synthetic
AREAVVIAATHLDY

SEQ ID NO: 12583 - protein, 109 aa, Artificial Sequence
  Synthetic
EIVLTQSPATLSLSPGERATLSCRASQSVSSYLDWYQQKPGQAPRLLIYDASNRATGIPARFSGSGSGTDFTLTISSLEPEDFAVYYCQQRTNWPPGYTFGQGTKLEIK

SEQ ID NO: 12584 - protein, 11 aa, Artificial Sequence
  Synthetic
QQRTNWPPGYT

SEQ ID NO: 12585 - protein, 117 aa, Artificial Sequence
  Synthetic
EVQLVESGGGLVQPGGSLRLSCAASGVIVSRNYMSWVRQAPGKGLEWVSVIYSGGSTFYADSVKGRFTISRDNSKNTLYLQMNSLRAEDTAVYYCARDFGDFYFDYWGQGTLVTVSS

SEQ ID NO: 12586 - protein, 11 aa, Artificial Sequence
  Synthetic
ARDFGDFYFDY

SEQ ID NO: 12587 - protein, 108 aa, Artificial Sequence
  Synthetic
EIVLTQSPGTLSLSPGERATLSCRASQSLSTSYLAWYQQKPGQAPRLLIYDASSRATGIPDRFSGSGSGTDFTLTISRLEPEDFAVYYCQQYGSSPRTFGPGTKVDIK

SEQ ID NO: 12588 - protein, 9 aa, Artificial Sequence
  Synthetic
QQYGSSPRT

SEQ ID NO: 12589 - protein, 122 aa, Artificial Sequence
  Synthetic
QVQLQESGPGLVKPSQTLSLTCTVSGGSISSGDYYWSWIRQPPGKGLEWIGYIFYSGSTYYNPSLKSRVTMSVDTSKNLFSLKMTSVTAADTAIYYCARVIRTLPVARFDYWGQGILVTVSS

SEQ ID NO: 12590 - protein, 14 aa, Artificial Sequence
  Synthetic
ARVIRTLPVARFDY

SEQ ID NO: 12591 - protein, 108 aa, Artificial Sequence
  Synthetic
QSALTQPASVSGSPGQSITISCTGTSSDVGSYNLVSWYQQHPGKAPRLMIYEVSERPSGVSNRFSGSKSGNTASLTISGLQAEDEAAYYCCSYAPTFTLFGGGTKVTV

SEQ ID NO: 12592 - protein, 9 aa, Artificial Sequence
  Synthetic
CSYAPTFTL

SEQ ID NO: 12593 - protein, 121 aa, Artificial Sequence
  Synthetic
QVQLVESGGGVVQPGGSLRLSCAASGFTFNTYAMHWVRQAPGKGLEWVAVISDDGNSKFYAESMKGRFTISRDNSEDTLFLQMTSLRREDTAVYYCARDPDIGTYYYFDLWGQGSLVTVSS

SEQ ID NO: 12594 - protein, 14 aa, Artificial Sequence
  Synthetic
ARDPDIGTYYYFDL

SEQ ID NO: 12595 - protein, 108 aa, Artificial Sequence
  Synthetic
DIQMTQSPSSLSASVGDRVTITCRASQSINSYLNWYQQKPGKAPKLLIHAASKLQSGVPSRFSGSGSGTEFTLTISSLQLEDFATYYCQQSYSMLALTFGGGTKVEIK

SEQ ID NO: 12596 - protein, 10 aa, Artificial Sequence
  Synthetic
QQSYSMLALT

SEQ ID NO: 12597 - protein, 133 aa, Artificial Sequence; identical to SEQ ID NO: 12001
  Synthetic

SEQ ID NO: 12598 - protein, 25 aa, Artificial Sequence
  Synthetic
AIQRRDGFNYRFEGRGEIYYYYMDV

SEQ ID NO: 12599 - protein, 113 aa, Artificial Sequence; identical to SEQ ID NO: 12003
  Synthetic

SEQ ID NO: 12600 - protein, 13 aa, Artificial Sequence
  Synthetic
QSYDSSLSDWDVV

SEQ ID NO: 12601 - protein, 124 aa, Artificial Sequence
  Synthetic
QVQLVESGGGVVQPGRSLRLSCAASGFTFSSYAMNWVRQAPGKGLEWVALISYDGSNKFYADSVKGRFTISRDTSKNTLYLQMSSLRVEDTAVYYCAREKQWVQQGYYYFMDVWGKGTTVAVSS

SEQ ID NO: 12602 - protein, 17 aa, Artificial Sequence
  Synthetic
AREKQWVQQGYYYFMDV

SEQ ID NO: 12603 - protein, 107 aa, Artificial Sequence
  Synthetic
EIVMTQSPATLSVSPGERATLSCRASQSVSSNLAWFQQKPGRAPRLLIFGASTRATGIPARFSGSGSGTEFTLTISSLESEDFAVYYCQQYFNWPRTFGQGTKVEIK

SEQ ID NO: 12604 - protein, 9 aa, Artificial Sequence
  Synthetic
QQYFNWPRT

SEQ ID NO: 12605 - protein, 122 aa, Artificial Sequence
  Synthetic
QVQLQESGPGLVKPSQTLSLTCTVSGGSISSGDYYWSWIRQHPGKGLEWIGNIFYSGPTYYNPSLKSRVTISVDRAKNQFSLKLSSVTAADTAVYYCARFARRGGEYYFDYWGQGTLVTVSS

SEQ ID NO: 12606 - protein, 14 aa, Artificial Sequence
  Synthetic
ARFARRGGEYYFDY

SEQ ID NO: 12607 - protein, 108 aa, Artificial Sequence
  Synthetic
QSVLTQPTSVSGSPGQSITISCTGTSSDIGSYDLVSWYQQHPGKAPKLIIYEVAVRPSGVSNRFSGSKSGSTASLTISGLQAEDEADYYCCSYAGRVFFGGGTKLTVL

SEQ ID NO: 12608 - protein, 8 aa, Artificial Sequence
  Synthetic
CSYAGRVF

SEQ ID NO: 12609 - protein, 119 aa, Artificial Sequence
  Synthetic
EVQLVQSGAEVKKPGESLKISCKASGYSFISHWIGWVRQMPGKGLEWMGIIYPGDSDTRYSPSFQGQVTISADRSITTAYLQWSSLKASDSAMYYCARTPTIFGWFDPWGQGTLVTVSS

SEQ ID NO: 12610 - protein, 12 aa, Artificial Sequence
  Synthetic
ARTPTIFGWFDP

SEQ ID NO: 12611 - protein, 110 aa, Artificial Sequence
  Synthetic
QSVLTQPPSASGTPGQRVTISCSGSSSNIGSNPVNWYQQLPGTAPKLLIYSNNQRPSGVPDRFSGSKSGTSASLAISGLQSEDEADYYCAAWDDSLNVVLFGGGTKVTVL

SEQ ID NO: 12612 - protein, 11 aa, Artificial Sequence
  Synthetic
AAWDDSLNVVL

SEQ ID NO: 12613 - protein, 122 aa, Artificial Sequence
  Synthetic
EVQLLESGGGLIQPGGSLRLSCAASGFTFSSHAMSWVRRAPGKGLEWVSGMSGSGDNTFYADSVKGRFTISRDNSKNTVYLQMNSLRAEDTAVYFCAKDLVTNPSYEAFDMWGQGTMVTVSS

SEQ ID NO: 12614 - protein, 15 aa, Artificial Sequence
  Synthetic
AKDLVTNPSYEAFDM

SEQ ID NO: 12615 - protein, 109 aa, Artificial Sequence
  Synthetic
SYVLTQPPSVSVAPGKTARITCGGDDIGSKSVHWYQQKPGQAPVLVIYYDSDRPSGIPERFSGSNSGNTATLTISRVEAGDEADYSCQVWDGTSDHPVVFGGGTKLTVL

SEQ ID NO: 12616 - protein, 12 aa, Artificial Sequence
  Synthetic
QVWDGTSDHPVV

SEQ ID NO: 12617 - protein, 120 aa, Artificial Sequence
  Synthetic
EVQLLESGGDLVQPGGSLRLSCAASGFTFSSSDMNWVRQAPGKGLEWVSAISGGGGRSYYADSVKGRFTISRDISRNTLYLQMNGLRAEDTAIYYCAKGGGILWWLITNWGQGSLVTVSS

SEQ ID NO: 12618 - protein, 13 aa, Artificial Sequence
  Synthetic
AKGGGILWWLITN

SEQ ID NO: 12619 - protein, 111 aa, Artificial Sequence
  Synthetic
NFMLTQPHSVSESPGKTVTISCTGSSGFIANNYVQWYQQRPGSAPTTLIYEDNQRPSGVPDRFSGSIDSSSNSASLTISGLKTEDEADYYCQSYDSSNLVVFGGGTKLTVL

SEQ ID NO: 12620 - protein, 10 aa, Artificial Sequence
  Synthetic
QSYDSSNLVV

SEQ ID NO: 12621 - protein, 117 aa, Artificial Sequence
  Synthetic
EVQLVESGGGLIQPGGSLRLSCVAFEFIVSSNYMSWVRQIPGKGLEWVSVIYAGGSTFYADSVKGRFTISRDDSKNTLYFQMNSLRAEDTAIYYCARDFGEFFFDYWGQGTLVTVSS

SEQ ID NO: 12622 - protein, 11 aa, Artificial Sequence
  Synthetic
ARDFGEFFFDY

SEQ ID NO: 12623 - protein, 107 aa, Artificial Sequence
  Synthetic
EIVLTQSPGTLSLSPGERAPLSCRASQDINNFLAWYQQKPGQAPRLLIYGASNRATGIPDRFSGSGSGTDFTLTISRLDPEDSAVYYCQQYGGSPRTFGQGTKVEIK

SEQ ID NO: 12624 - protein, 9 aa, Artificial Sequence
  Synthetic
QQYGGSPRT

SEQ ID NO: 12625 - protein, 117 aa, Artificial Sequence
  Synthetic
EVQLVESGGGLIQPGGSLRLSCAVSEIIVSSNYMSWVRQAPGKGLEWVSVLYAGGSTFYADSVKGRFTISRDNSKNTLYLQMNSLRVEDTAVYYCARDFGEFWFDYWGQGALVIVSS

SEQ ID NO: 12626 - protein, 11 aa, Artificial Sequence
  Synthetic
ARDFGEFWFDY

SEQ ID NO: 12627 - protein, 107 aa, Artificial Sequence
  Synthetic
EIVLTQSPGTLSLSPGDTATLSCRASQSVSSYLAWYQQKPGQAPRLLIYDASTRATGIPDRFSGSGSGTDFTLTISRREPEDFGMYYCQQYGSSPRTFGQGTKVEIK

SEQ ID NO: 12628 - protein, 9 aa, Artificial Sequence
  Synthetic
QQYGSSPRT

SEQ ID NO: 12629 - protein, 122 aa, Artificial Sequence
  Synthetic
QVQLQESGPGLVKPSQTLSLTCSVSGDSITSGDYYWSWIRQPPGKGLEWIGYVDKRGNTYYHPSLRSRVIISLDTSKNQFSLKLSSVTAADTAVYYCGGARVVITFVWFDLWGPGTLVTVSS

SEQ ID NO: 12630 - protein, 14 aa, Artificial Sequence
  Synthetic
GGARVVITFVWFDL

SEQ ID NO: 12631 - protein, 110 aa, Artificial Sequence
  Synthetic
NFMLTQPQSVSESPGKTVTISCTGSSGSIASNYVQWYQQRPGSAPTTVIYEDNQRPSGVPDRISGSIDSSSNSASLTISALKAEDEADYYCQSFASGNPVFGGGTKLTVL

SEQ ID NO: 12632 - protein, 9 aa, Artificial Sequence
  Synthetic
QSFASGNPV

SEQ ID NO: 12633 - protein, 118 aa, Artificial Sequence
  Synthetic
EVQLVQSGAEVKKPGESLKISCKGSGYRFTSYWIGWVRQMPGKGLEWMGIIYPGDSDTRYSPSFQGQVTISADKSISTAYLQWSSLKASDTAMYYCARSRSTNMFDLWGQGTLVTVSS

SEQ ID NO: 12634 - protein, 11 aa, Artificial Sequence
  Synthetic
ARSRSTNMFDL

SEQ ID NO: 12635 - protein, 106 aa, Artificial Sequence
  Synthetic
DIQMTQSPSSLSASVGDRVTITCRASQDISNYLNWYQQKPGKAPKLLIYDASNLETGVPSRFSGSGSGTDFTFTISSLQPEDIATYHCQQYQNLYTFGGGTKVEIK

SEQ ID NO: 12636 - protein, 8 aa, Artificial Sequence
  Synthetic
QQYQNLYT

SEQ ID NO: 12637 - protein, 123 aa, Artificial Sequence
  Synthetic
EVQLVESGGGLVKPGGSLRLSCEASGFTFSSYTMTWVRQAPGKGLEWVSSISSTNSYIYYGDSVKGRFTISRDNDKNSLYLHMHSLRAEDTSLYYCARASRGSWFGRAEFDFWGQGTLVTVSS

SEQ ID NO: 12638 - protein, 16 aa, Artificial Sequence
  Synthetic
ARASRGSWFGRAEFDF

SEQ ID NO: 12639 - protein, 110 aa, Artificial Sequence
  Synthetic
QSVLTQPPSASGTPGQRVTISCSGSNSNIGSNYVCWYQQLPRTAPKLLMYRDNQRPSGVPDRFSGSRSGTSASLAISGLRSEDEADYYCAVWDDSLSGPVFGGGTKLTVL

SEQ ID NO: 12640 - protein, 11 aa, Artificial Sequence
  Synthetic
AVWDDSLSGPV

SEQ ID NO: 12641 - protein, 119 aa, Artificial Sequence
  Synthetic
EVQLVQSGAEVKKPGESLKISCKGSGYSFISHWIAWVRQMPGKGLEWMGIIYPGDSDTRYSPSFQGQVTISADKSISTAYLQWSSLKASDTAMYFCARGPNAVNWFDSWGQGTLVTVPS

SEQ ID NO: 12642 - protein, 12 aa, Artificial Sequence
  Synthetic
ARGPNAVNWFDS

SEQ ID NO: 12643 - protein, 110 aa, Artificial Sequence
  Synthetic
QSVLTQPPSASGTPGQRVTISCSGSSSNIGSNTVNWYQQLPGTAPKLLIYNNNQRPSGVPDRFSGSKSGTSASLAISGLQSEDEADYYCAAWDDSLNGGVFGGGTKLTVL

SEQ ID NO: 12644 - protein, 11 aa, Artificial Sequence
  Synthetic
AAWDDSLNGGV

SEQ ID NO: 12645 - protein, 125 aa, Artificial Sequence
  Synthetic
QVQLQQWGAGLLKPSETLSLTCAVYGGSFSGYYWSWVRQPPGKGLEWIGEINDSGRTNYNPSLKSRVTISGDTSKNQLSLNLSSVTAADTAVYYCARETYYYDSSAYGVNWFDPWGQGTLVTVSS

SEQ ID NO: 12646 - protein, 19 aa, Artificial Sequence
  Synthetic
ARETYYYDSSAYGVNWFDP

SEQ ID NO: 12647 - protein, 111 aa, Artificial Sequence
  Synthetic
QSVLTQPPSVSGAPGQRVTISCTGSSSNIGAGYDVHWYQQFPGTAPKLLIYDNSNRPSGVPDRFSGSKSGTSASLAITGLQAEDEADYYCQSYDTSLSGYVFGSGTRVTVL

SEQ ID NO: 12648 - protein, 11 aa, Artificial Sequence
  Synthetic
QSYDTSLSGYV

SEQ ID NO: 12649 - protein, 135 aa, Artificial Sequence
  Synthetic
EVQLVESGGALVKPGGSLRLSCAASGFTFNNAWMNWVRQAPGKGLEWVGRIKSKTDGGTTDYAAPVKGRFTISRDDSKNTLYLQMNSLKTEDTAVYYCTTCTNQLLYRERGGWINYDYYYYMDVWGQGTTVTVSS

SEQ ID NO: 12650 - protein, 26 aa, Artificial Sequence
  Synthetic
TTCTNQLLYRERGGWINYDYYYYMDV

SEQ ID NO: 12651 - protein, 109 aa, Artificial Sequence
  Synthetic
SYVLTQPPSVSVAPGKTASISCGGDNIGSTNVHWYQQKPGQAPVLVVFDDSDRPSGIPERFSGSSSGNTATLTISRVEAGDEADYYCQVWGSNSDHLYVFGTGTKVTVL

SEQ ID NO: 12652 - protein, 12 aa, Artificial Sequence
  Synthetic
QVWGSNSDHLYV

SEQ ID NO: 12653 - protein, 123 aa, Artificial Sequence
  Synthetic
QVQLQESGPGLVKPSQTLSLTCTVSGGSISSGNYYWSWIRQQPGKGLEWIGYIYYSGITYYNPSLKSRSSISVDTSNNHFSVKLNSVTAADTAIYYCARFNRVYGSGRALDSWGQGILVTVSS

SEQ ID NO: 12654 - protein, 15 aa, Artificial Sequence
  Synthetic
ARFNRVYGSGRALDS

SEQ ID NO: 12655 - protein, 110 aa, Artificial Sequence
  Synthetic
QSVLTQPASVSGSPGQSITISCTGTSSDVGSYNLVSWYQQHPGKAPKVVIYDDIERPSGVSNRFSGAKSGNTASLTISGLQVEDEGESYFCSYAGGNNLVFGGGTKVTVL

SEQ ID NO: 12656 - protein, 10 aa, Artificial Sequence
  Synthetic
CSYAGGNNLV

SEQ ID NO: 12657 - protein, 120 aa, Artificial Sequence
  Synthetic
QVQLVESGGGVVPPGRSLRLSCAASGFTFSDDAMHWVRQAPGKGLEWVAVIWSDGRGKHYADSVKGRFTISRDNSQHTLYLQMDSLRAEDTAVYYCARDYGSMVTYFDSWGQGTLVTVSS

SEQ ID NO: 12658 - protein, 13 aa, Artificial Sequence
  Synthetic
ARDYGSMVTYFDS

SEQ ID NO: 12659 - protein, 108 aa, Artificial Sequence
  Synthetic
DIQMTQSPVSLSASVGDRVTITCRASQNIRSYLNWYQQKPGKAPKLLIYDASSVQSGVPSRFSGSGSGTDFTLTISSLQPEDFATYYCQQSYSTPPWTFGQGTKVEIK

SEQ ID NO: 12660 - protein, 10 aa, Artificial Sequence
  Synthetic
QQSYSTPPWT

SEQ ID NO: 12661 - protein, 122 aa, Artificial Sequence
  Synthetic
  misc_feature (38)..(38): Xaa can be any naturally occurring amino acid
  misc_feature (45)..(45): Xaa can be any naturally occurring amino acid
  misc_feature (64)..(64): Xaa can be any naturally occurring amino acid
QVQLVESGGGVVQPGRSLRLSCAASGFIFGSYGMHWVXQAPGKGXEWVVIIWYNAPKKFHEDSXKGRFTISRDNSKNTLYLQMNSLRADDTAVYYCAREAGDPTVTTEFDYWGQGTLVTVSS

SEQ ID NO: 12662 - protein, 15 aa, Artificial Sequence
  Synthetic
AREAGDPTVTTEFDY

SEQ ID NO: 12663 - protein, 111 aa, Artificial Sequence
  Synthetic
QSVLTQPPSVSGAPGQRVTISCTGSSSNIGAGYAVHWYQQLPGAAPKLLIYDNSNRPSGVPDRFSGSKSGTSASLAITGLQAEDEADYYCQSYDSSLSGYVFGTGTKVTVL

SEQ ID NO: 12664 - protein, 11 aa, Artificial Sequence
  Synthetic
QSYDSSLSGYV

SEQ ID NO: 12665 - protein, 120 aa, Artificial Sequence
  Synthetic
EVQLVESGGGLVQPGGSLRLSCAASGFTFSTYWMSWVRQTPGKGLEWVANIKQDGSEKFYVDSVKGRFTISRDNTKNSLYLQMNSLRAEDTAVYYCARARTGWYTGIDYWGQGTLVTVSS

SEQ ID NO: 12666 - protein, 13 aa, Artificial Sequence
  Synthetic
ARARTGWYTGIDY

SEQ ID NO: 12667 - protein, 110 aa, Artificial Sequence
  Synthetic
NFMLTQPHSVSESPGKTVTISCTGSSGSIASNYVQWYQQRPGSAPTTVIDEDNQRPSGVPDRFSGSIDSTSNSASLTISGLKTEDEADYYCQSYDSYNWVFGGGTKLTVL

SEQ ID NO: 12668 - protein, 9 aa, Artificial Sequence
  Synthetic
QSYDSYNWV

SEQ ID NO: 12669 - protein, 128 aa, Artificial Sequence
  Synthetic
QVQLVQSGAEVKKPGSSVKVSCTASGGTFSNFAISWVRQAPGQGLEWMGVIIPIFRTSNFAQKLQGRLMITADESTTTAYMELSSLRSEDTAVYYCATHPRAHGSSWPYSYDYYMDVWGAGTTVTVSS

SEQ ID NO: 12670 - protein, 21 aa, Artificial Sequence
  Synthetic
ATHPRAHGSSWPYSYDYYMDV

SEQ ID NO: 12671 - protein, 111 aa, Artificial Sequence
  Synthetic
QSVLTQPASVSGSPGQSITISCSGTSSDVGGYNYVSWYQEHPGKAPKLIIYDVSNRPSGVSDRFSGSKSGNTASLTISGLQAEDEADYYCSSYTPITTHNFVFGTGTRVTV

SEQ ID NO: 12672 - protein, 12 aa, Artificial Sequence
  Synthetic
SSYTPITTHNFV

SEQ ID NO: 12673 - protein, 119 aa, Artificial Sequence
  Synthetic
QVQLQESGPGLVKPSQTLSLTCTVSRDSISSGGYYWSWIRQHPGKGLEWIGYIYYSGSTNYNPSLKSRVTISVDTAKNQVSLKLSSVTAADTAVYYCAREGTTGYFEYWGQGTLVTVSS

SEQ ID NO: 12674 - protein, 11 aa, Artificial Sequence
  Synthetic
AREGTTGYFEY

SEQ ID NO: 12675 - protein, 108 aa, Artificial Sequence
  Synthetic
EIVLTQSPGTLSLSPGERGALSCRASQNLYSRNLAWYQQKPGQAPRLLIYGASNRATGIPDRFSGSGSGTDFTLTISRLEPEDFAVYYCQQYGSSQITFGQGTRLEIK

SEQ ID NO: 12676 - protein, 9 aa, Artificial Sequence
  Synthetic
QQYGSSQIT

SEQ ID NO: 12677 - protein, 120 aa, Artificial Sequence
  Synthetic
QLQLQESGPRLVKPSETLSLTCTVSGGPIDSTSYYLGWIRQPPGKGLEWIGSIYYSGSTHYNPSLKSRVTMSLDTSKNQVSLIMSSVTAADTAVYYCARRHIPFEFFHLWGRGTLVTVSS

SEQ ID NO: 12678 - protein, 12 aa, Artificial Sequence
  Synthetic
ARRHIPFEFFHL

SEQ ID NO: 12679 - protein, 113 aa, Artificial Sequence
  Synthetic
DIVMTQSPVSLAVSLGERATINCKSSQSVLYNSNNKNYLAWYQQHPGQPPKLLIYWASTRESGVPDRFSGSGSGTDFNLTISSLQAEDVAVYYCQQYSSPPLTFGPGTKVDIK

SEQ ID NO: 12680 - protein, 9 aa, Artificial Sequence
  Synthetic
QQYSSPPLT

SEQ ID NO: 12681 - protein, 124 aa, Artificial Sequence
  Synthetic
EVQLVESGGGLVQPGGSLRLSCAASGFTFSAYSMNWVRQAPGKGLEWISYISSASSTIKYADSVKGRFTISRDNAKNSLYLQMNSLRDEDTAMYYCARDPRNPSDYYYYYMDVWGKGTTVTVSS

SEQ ID NO: 12682 - protein, 17 aa, Artificial Sequence
  Synthetic
ARDPRNPSDYYYYYMDV

SEQ ID NO: 12683 - protein, 108 aa, Artificial Sequence
  Synthetic
QSVLTQPRSVSGSPGQSVTISCTGTSSDVGDYGYVSWYLQHPGKAPKLLIFDVDKRPSGVPDRFSGSKSGNTASLTISGLQAEDEADYYCCSYAGSYFFGGGTKLTVL

SEQ ID NO: 12684 - protein, 8 aa, Artificial Sequence
  Synthetic
CSYAGSYF

SEQ ID NO: 12685 - protein, 127 aa, Artificial Sequence
  Synthetic
QVQLVESGGGVVQPGRSLRLSCAASGFTFNHYGMHWVRQSPGKGLEWVAVILYDGSNKYYADSVKGRFTISRDNSKNTLYLQMNSLRTEDTAVYFCAKQGSPYCSAGNCYLGYFDYWGQGTLVTVSS

SEQ ID NO: 12686 - protein, 20 aa, Artificial Sequence
  Synthetic
AKQGSPYCSAGNCYLGYFDY

SEQ ID NO: 12687 - protein, 107 aa, Artificial Sequence
  Synthetic
DIQMTQSPVSLSASVGDRVTITCQAGQDISHYLNWYQQKPGKAPKLLIYDASNLETGVPSRFSGSGSGTHFTFTISSLQPADIATYYCQQYDNLPPTFGPGTKVDIK

SEQ ID NO: 12688 - protein, 9 aa, Artificial Sequence
  Synthetic
QQYDNLPPT

SEQ ID NO: 12689 - protein, 127 aa, Artificial Sequence
  Synthetic
QVQLVESGGGVVQPGRSLRLSCTASGFTFNNYGMHWVRQAPGKGLEWVALILYDGSNKYYADSVKGRFTISRDNSKNTLYLQMNSLRAEDTAVYFCSKQLGGYCSGSNCYSGIFDYWGQGTLVTVSS

SEQ ID NO: 12690 - protein, 20 aa, Artificial Sequence
  Synthetic
SKQLGGYCSGSNCYSGIFDY

SEQ ID NO: 12691 - protein, 106 aa, Artificial Sequence
  Synthetic
DIQMTQSPSTLSASVGDRVTITCRASQSISSWLAWYQQKPGKAPKLLIYEASNLENGVPSRFSGSGSGTEFTLTISSLQPDDFATYYCQQYNSGVTFGGGTKVEIK

SEQ ID NO: 12692 - protein, 8 aa, Artificial Sequence
  Synthetic
QQYNSGVT

SEQ ID NO: 12693 - protein, 127 aa, Artificial Sequence
  Synthetic
QVQLVQSGAEVKKPGSSVNVSCKASGGTFSSYSITWVRQAPGQGLEWMGRIIPILGIANYAQKFQGRVTITADKSTSTAYMELRSLRSEDRAVYYCARVRGSDYYGSGLGVHYMDVWGKGTTVTVSS

SEQ ID NO: 12694 - protein, 20 aa, Artificial Sequence
  Synthetic
ARVRGSDYYGSGLGVHYMDV

SEQ ID NO: 12695 - protein, 111 aa, Artificial Sequence
  Synthetic
QSVLTQPPSVSGAPGQRVTISCTGGNSNIGAGYDVHWYQQLPGIAPKLLIYGNTNRPSGVPDRFSGSKSDTSASLAITGLQAEDEADYYCQSYDSSLSDDVFGTGTKVTVL

SEQ ID NO: 12696 - protein, 11 aa, Artificial Sequence
  Synthetic
QSYDSSLSDDV

SEQ ID NO: 12697 - protein, 119 aa, Artificial Sequence
  Synthetic
QVQLVQSGAEVKKPGASVKVSCKTSGYTFTNYGISWVRQAPGQGLEWMGWISTYNGNTNYAQKFRDRVTMTTDTSTRTAYMELRSLRSDDTAAYYCATATHYGVANDYWGQGTLVTVSS

SEQ ID NO: 12698 - protein, 12 aa, Artificial Sequence
  Synthetic
ATATHYGVANDY

SEQ ID NO: 12699 - protein, 112 aa, Artificial Sequence
  Synthetic
NFMLTQPHSVSESPGKTVTISCTGSSGSIASNYVQWYQQRPGSAPTTVIYEDNQRPSGVPDRFSGSIDSSSNSASLTISGLKTEDEADYYCQSYDFSNPSWVFGGGTKLTVL

SEQ ID NO: 12700 - protein, 11 aa, Artificial Sequence
  Synthetic
QSYDFSNPSWV

SEQ ID NO: 12701 - protein, 122 aa, Artificial Sequence
  Synthetic
QVQLVQSGAELKKPGASVKVSCKASVDTFATYYIHWVRQAPGQRLEWMGIINPSAGSTTYAQKFQGRVTMTGDTSTSTVYMELRGLTSEDTAVYYCARGQLIPAARDAFDIWGQGTMVTVSS

SEQ ID NO: 12702 - protein, 15 aa, Artificial Sequence
  Synthetic
ARGQLIPAARDAFDI

SEQ ID NO: 12703 - protein, 106 aa, Artificial Sequence
  Synthetic
DIQMTQSPVSLSASVGDRVTITCRASQSVGTWLAWYQQKPGKAPKLLIYKASSLQSGVSSTFSGSGSGTEFTLTISSLQPDDFATYYCQQYNSYWTFGQGTKVEIK

SEQ ID NO: 12704 - protein, 8 aa, Artificial Sequence
  Synthetic
QQYNSYWT

SEQ ID NO: 12705 - protein, 126 aa, Artificial Sequence
  Synthetic
QVQLVQSGAEVRKPGSSVKVSCKASGGTFSNYAISWVRQAPGQGLEWMGRIIPFLDMAYYAQRFQGRVTITADKSTSTAYLDLSSLRSEDTALYYCARSWDSQGYLNPWEGPVGPWGQGTLVTVSS

SEQ ID NO: 12706 - protein, 19 aa, Artificial Sequence
  Synthetic
ARSWDSQGYLNPWEGPVGP

SEQ ID NO: 12707 - protein, 105 aa, Artificial Sequence
  Synthetic
DIQMTQSPVSLSASVRDRVTITCRASQSISGWLAWYQLKPGKAPKLLIYKASSLESGVPSRFSGSASGTEFTLTIGGLQPVDFAVFSANRIKLILRSAKGPRWKS

SEQ ID NO: 12708 - protein, 8 aa, Artificial Sequence
  Synthetic
NRIKLILR

SEQ ID NO: 12709 - protein, 121 aa, Artificial Sequence
  Synthetic
EVQLVESGGGLVQPGGSLRLSCSASGFTFSNYALHWVRQAPGKGLEYVAGLSDNGGSPYYADSVKGRFTISRDNSKNTLYLQLSSLRAEDTAVYFCVKDHSSSFGDYFDYWGQGILVTVSS

SEQ ID NO: 12710 - protein, 14 aa, Artificial Sequence
  Synthetic
VKDHSSSFGDYFDY

SEQ ID NO: 12711 - protein, 109 aa, Artificial Sequence
  Synthetic
SYVLTQPPSVSVAPGKTARITCGGDNIGSKSVHWYQHKPGQAPVLVIYYDGDRPSGIPERFSASNSGNTATLTISRVEAGDEADYFCQVWDGSSGHHYVFGTGTKVTVL

SEQ ID NO: 12712 - protein, 12 aa, Artificial Sequence
  Synthetic
QVWDGSSGHHYV

SEQ ID NO: 12713 - protein, 127 aa, Artificial Sequence
  Synthetic
QVQLVQSGAEVKKPGSSVKVSCKASGDTFNSYAFSWVRQAPGQGLEWMGGIIPIYGVTNYAQKFQGRVTMTADESTSTAYMELSSLRSEDTAIYYCATSEGNSGGGAYYFYYYMNVWGKGTTVTVSS

SEQ ID NO: 12714 - protein, 20 aa, Artificial Sequence
  Synthetic
ATSEGNSGGGAYYFYYYMNV

SEQ ID NO: 12715 - protein, 111 aa, Artificial Sequence
  Synthetic
QSVLTQPASVSGSPGQSITISCTGTSSDVGAYDYVSWYQQHPGKAPKLMIYDVSNRPSGVSNRFSGSKSGNTASLTISGLHAEDEADYYCSSYRTSTTWWVFGGGTKLTVL

SEQ ID NO: 12716 - protein, 11 aa, Artificial Sequence
  Synthetic
SSYRTSTTWWV

SEQ ID NO: 12717 - protein, 124 aa, Artificial Sequence
  Synthetic
EVQLVQSGAEVKKPGESLMISCEGSGYSFTSYWINWVRQMPGKGLEWMGRIDLSDSYTNYSPSFEGRVTISADRSTNTAYLRWSSLKASDTAMYYCARQSGPGNYYSYYYMDVWGKGTTVTVSS

SEQ ID NO: 12718 - protein, 17 aa, Artificial Sequence
  Synthetic
ARQSGPGNYYSYYYMDV

SEQ ID NO: 12719 - protein, 108 aa, Artificial Sequence
  Synthetic
DIQMTQSPSSLSASVGDRVTITCRASQDISNSVAWYQQRPGKVPKVLIYAASTLQSGVPSRFSGSGSGTDFTLTISSLQPEDVATYYCQKYNTALGFTFGPGTKVYIK

SEQ ID NO: 12720 - protein, 10 aa, Artificial Sequence
  Synthetic
QKYNTALGFT

SEQ ID NO: 12721 - protein, 114 aa, Artificial Sequence
  Synthetic
EVQLVESGGDLVQPGGSLRLTCAASGIIVSRNYMSWVRQAPGKGLEWVAVIYSGGSTFYADSVKGRFTISRHNSKNTLFLQMNSLRPDDTAVYYCAREVYAFDIWGQGTMVAVS

SEQ ID NO: 12722 - protein, 9 aa, Artificial Sequence
  Synthetic
AREVYAFDI

SEQ ID NO: 12723 - protein, 107 aa, Artificial Sequence
  Synthetic
DIQLTQSPSFLSASVGDRVTITCRASQGINTYLAWYQQKPGKAPKLLIYSASTLQSGVPSRFSGSGSGTEFTLTISSLQPEDFGTYYCQLLNSYPGLTFGGGTKVEI

SEQ ID NO: 12724 - protein, 10 aa, Artificial Sequence
  Synthetic
QLLNSYPGLT

SEQ ID NO: 12725 - protein, 119 aa, Artificial Sequence
  Synthetic
EVQLVESGGDLVQPGGSLRLTCAASGFTFSNYDMHWVRQITGKGLEWVSGTGTSGDSYYADSVKGRFTISREDAKNSLFLQMNSLRAGDTAVYYCARGHSSGYYYYFDYWGQGTLVTVS

SEQ ID NO: 12726 - protein, 14 aa, Artificial Sequence
  Synthetic
ARGHSSGYYYYFDY

SEQ ID NO: 12727 - protein, 108 aa, Artificial Sequence
  Synthetic
DIQMTQSPVSLSASVGDRVTITCRASQRIGSYLNWYQQKPGKAPKLLIYAASSLQSGVPSRFRGSGSGTDFTLTISGLQPEDFATYSCQQSYSSPPWTFGQGTKVEIK

SEQ ID NO: 12728 - protein, 10 aa, Artificial Sequence
  Synthetic
QQSYSSPPWT

SEQ ID NO: 12729 - protein, 120 aa, Artificial Sequence
  Synthetic
QVQLQESGPGLVKPSQTLSLTCTVSGGSISSGGFYWTWIRQHPGKGLEWIGYIDYSGSTDHNPSLKSRVTMSLDTSKKQFSLKLSSVTAADTAVYYCARGGIPYYYMDVWGKGTTVTVSS

SEQ ID NO: 12730 - protein, 12 aa, Artificial Sequence
  Synthetic
ARGGIPYYYMDV

SEQ ID NO: 12731 - protein, 108 aa, Artificial Sequence
  Synthetic
SYVLTQPPSVSVAPGKTATITCGGDNIGSKSVHWYQQKPGQAPVLVIYYDSARPSGIPERFSGSNSGNTATLTISRVEAGDEADYFCQVWDSSTDHAVFGGGTQLTVL

SEQ ID NO: 12732 - protein, 11 aa, Artificial Sequence
  Synthetic
QVWDSSTDHAV

SEQ ID NO: 12733 - protein, 117 aa, Artificial Sequence
  Synthetic
EVQLVESGGGLVQPGGSLKLSCAASGVTVSSNYMSWVRQAPAKGLEWVSVIYSGGSEFYADSVKGRFIISRDNPKNTLYLQMNSLRAEDTAVYYCAREVWGGAFDIWGQGTMVTVSS

SEQ ID NO: 12734 - protein, 11 aa, Artificial Sequence
  Synthetic
AREVWGGAFDI

SEQ ID NO: 12735 - protein, 108 aa, Artificial Sequence
  Synthetic
DIQLTQSPSFLSASVGDRVTITCRASQGISTYLAWYQQKPGKAPKLLIYAASTLQSGVPSRFSGSGSGTEFTLTISSLQPEDFATYYCQQLNGYPHTTFGGGTKVEIK

SEQ ID NO: 12736 - protein, 10 aa, Artificial Sequence
  Synthetic
QQLNGYPHTT

SEQ ID NO: 12737 - protein, 122 aa, Artificial Sequence
  Synthetic
QVQLVESGGGVVQPGRSLRLSCAASGFIFSSYVMHWVRQAPGKGLEWVAVIWYNGRNKNYADSVKGRFTISRDNSKNTLYLEINSLRAEDTAVYYCAREAGDPTVTTEFDYWGQGTLVTVSS

SEQ ID NO: 12738 - protein, 15 aa, Artificial Sequence
  Synthetic
AREAGDPTVTTEFDY

SEQ ID NO: 12739 - protein, 111 aa, Artificial Sequence
  Synthetic
QSVLTQPPSVSGAPGQRVTISCTGSSSNIGAGYDVHWYQQLPGTAPKLLIYANTNRPSGVPDRFSGSKSGTSASLAITGLQAEDEADYYCQSYDSSLSASVFGTGTKVTVL

SEQ ID NO: 12740 - protein, 11 aa, Artificial Sequence
  Synthetic
QSYDSSLSASV

SEQ ID NO: 12741 - protein, 118 aa, Artificial Sequence
  Synthetic
EVQLVESGGGLVQPGGSLRLSCAASGFTFSNYWMHWVRQAPGKGLVWVSRINSYGSITTYADSVKGRFTISRDNAKNTLYLQMNSLRAEDTAVYYCARDLTYQLLSDWGPGTLVTVSS

SEQ ID NO: 12742 - protein, 11 aa, Artificial Sequence
  Synthetic
ARDLTYQLLSD

SEQ ID NO: 12743 - protein, 113 aa, Artificial Sequence
  Synthetic
NFMLTQPHSVSESPGKTVTISCTGSSGSIASNYVQWYQQRPGSAPTTVIYEDNQRPSGVPDRFSGSIDSSSNSASLTISGLETEDEADYYCQSYDGSNQGHVVFGGGTKLTVL

SEQ ID NO: 12744 - protein, 12 aa, Artificial Sequence
  Synthetic
QSYDGSNQGHVV

SEQ ID NO: 12745 - protein, 125 aa, Artificial Sequence
  Synthetic
QVQLQQWGAGLLKPSETLSLTCAVYSGSFSGYNWNWIRQPPGKGLEWIGEINHSGTTKYNPSLKSRVTISVDTSNKQFSLDLSSVIAADTAVYYCVRGAFTFGGGRVNYYYMDVWGKGTTVTVSS

SEQ ID NO: 12746 - protein, 19 aa, Artificial Sequence
  Synthetic
VRGAFTFGGGRVNYYYMDV

SEQ ID NO: 12747 - protein, 107 aa, Artificial Sequence
  Synthetic
  misc_feature (9)..(9): Xaa can be any naturally occurring amino acid
DIQMTQSPXSLSASVGDRVTITCRASQSISRYLNWYQQKPGKAPKLLIYAASSLQSGVPSSFSGSGSGTDFTLTISSLQPEDFATYYCQQTYNIPRTFGQGTKVEIK

SEQ ID NO: 12748 - protein, 9 aa, Artificial Sequence
  Synthetic
QQTYNIPRT

SEQ ID NO: 12749 - protein, 127 aa, Artificial Sequence
  Synthetic
QVQLVQSGAEVKQPGASVKVSCKASGYIFTNHNMHWVRQAPGQGLEWMGMINPSGGSRSYAQKFQGRVTMTRDTSTSTVYMELSSLRSEDTAVYFCARDAGYCSADRCYTHDAFDIWGQGTMVTVSS

SEQ ID NO: 12750 - protein, 20 aa, Artificial Sequence
  Synthetic
ARDAGYCSADRCYTHDAFDI

SEQ ID NO: 12751 - protein, 109 aa, Artificial Sequence
  Synthetic
SYVLTQPPSVSVAPGKTARITCGENDIGSKSVHWYQQRPGQAPVLVIYDDSDRPSGIPERFSGSNSGSTATLTISRVEAGDEADYYCQVWDGNSDHHYVFGTGTWVTVL

SEQ ID NO: 12752 - protein, 12 aa, Artificial Sequence
  Synthetic
QVWDGNSDHHYV

SEQ ID NO: 12753 - protein, 129 aa, Artificial Sequence
  Synthetic
EVQLVESGGGVVRPGGSLRLSCAASGFNFDDYGMAWVRQAPGKGLEWVSSINWNGGSTTYADSVEGRFTISRDNGKKSLYLQMNTLRAEDTAFYHCAREHCGDNCYSFGSRGDTWFDPWGQGTLVTVSS

SEQ ID NO: 12754 - protein, 22 aa, Artificial Sequence
  Synthetic
AREHCGDNCYSFGSRGDTWFDP

SEQ ID NO: 12755 - protein, 112 aa, Artificial Sequence
  Synthetic
QSVLTQPPSVSGAPGQRVTISCTGSSSNIGSIYDVHWYQHLPGTAPKLLIYGNNNRPSGVPDRFSASKSGTSASLAITGLQAEDEADYYCQSYDSSLSAAVLFGGGTKLTVL

SEQ ID NO: 12756 - protein, 12 aa, Artificial Sequence
  Synthetic
QSYDSSLSAAVL

SEQ ID NO: 12757 - protein, 125 aa, Artificial Sequence
  Synthetic
QVQLQQWGAGLLKPSETLSLTCAVYGGSFSGFYWSWVRQPPGKGLEWIGEINDNGRTNYNPSLKSRVTMSGDTSKNQLSLKLTSVTAADTAVYYCARETYYYDSSAYGVNWLDPWGQGTLVTVSS

SEQ ID NO: 12758 - protein, 19 aa, Artificial Sequence
  Synthetic
ARETYYYDSSAYGVNWLDP

SEQ ID NO: 12759 - protein, 111 aa, Artificial Sequence
  Synthetic
QSVLTQPPSVSGAPGQRVTIPCTGSSSNIGAGYDVHWYQQFPGTAPKLLIYDSTNRPSGVPDRFSGSKSGTSASLAITGLQAEDEADYYCQSYDSSLSGYVFGSGTRVTVL

SEQ ID NO: 12760 - protein, 11 aa, Artificial Sequence
  Synthetic
QSYDSSLSGYV

SEQ ID NO: 12761 - protein, 121 aa, Artificial Sequence
  Synthetic
QVQLVQSGAEVVKPGASVNISCTASGYTFTTYYVHWVRQAPGQGLEWMGIINPSGGSRSYAQKFQGRVSLTWDTSRSTVYMELRSLRSEDTAVYYCARGAPAAIGDWFDPWGQGTLVTVSS

SEQ ID NO: 12762 - protein, 14 aa, Artificial Sequence
  Synthetic
ARGAPAAIGDWFDP

SEQ ID NO: 12763 - protein, 109 aa, Artificial Sequence
  Synthetic
SYVLTQPPSVSVAPGKTARISCGGDSIGSKSVHWYQQKPGQAPVLVIYYDTDRPSGIPERFSGSNSGNTATLTISRVEAGDEADYYCQVWDGSGDPHYVFGSGTKVTVL

SEQ ID NO: 12764 - protein, 12 aa, Artificial Sequence
  Synthetic
QVWDGSGDPHYV

SEQ ID NO: 12765 - protein, 123 aa, Artificial Sequence
  Synthetic
EVQLVQSGAEVKKPGESLMISCKGSGYNFATYWINWVRQMPGKGLEWMGRIDLSDSYTNYNPSFEGHVTISADTSTSTVYLRWSSLRASDTAMYYCARQSGPGNYYSYYYMDVWGKGTTVSVS

SEQ ID NO: 12766 - protein, 17 aa, Artificial Sequence
  Synthetic
ARQSGPGNYYSYYYMDV

SEQ ID NO: 12767 - protein, 108 aa, Artificial Sequence
  Synthetic
DIQMTQSPSSLSASVGDRVTITCRASQDIRNSVAWYQQKPGRVPTVLIYAASTLHSGAPSRFSGSGSGTDFTLTISSLQPEDVATYYCQRYNTALGFTFGPGTKVYIK

SEQ ID NO: 12768 - protein, 10 aa, Artificial Sequence
  Synthetic
QRYNTALGFT

SEQ ID NO: 12769 - protein, 126 aa, Artificial Sequence
  Synthetic
EVQLVESGGGLVQPGGSLRLSCAASGFTFSTYSVTWVRQAPGKGLEWVSYISSSSGTIYYADSVKGRFTISRDNAKNSVYLQMNSLRDEDTAVYYCASPAGTSCQNCYYYYYMDVWGKGTTVTVSS

SEQ ID NO: 12770 - protein, 19 aa, Artificial Sequence
  Synthetic
ASPAGTSCQNCYYYYYMDV

SEQ ID NO: 12771 - protein, 104 aa, Artificial Sequence
  Synthetic
EIVLTQSPGTLSLSPGERATLSCRASQTISTNYLAWYQQKPGQAPRLLIYGASSRATGIPDRFSGSGSGTDFTLTISRLEPEDFAVYYCQHLGLTFGGGTKVEI

SEQ ID NO: 12772 - protein, 6 aa, Artificial Sequence
  Synthetic
QHLGLT

SEQ ID NO: 12773 - protein, 117 aa, Artificial Sequence
  Synthetic
EVQLVESGGGLIQPGGSLRLSCVASGLIVSSNYMTWVRQAPGKGLEWVSVIFPGGSTFYADSVRGRFTISRDNSKNTLYLQMNSLRADDTAVYYCARDFFEGSLDSWGQGTLLTVSS

SEQ ID NO: 12774 - protein, 11 aa, Artificial Sequence
  Synthetic
ARDFFEGSLDS

SEQ ID NO: 12775 - protein, 108 aa, Artificial Sequence
  Synthetic
DIQLTQSPSFLSASVGDRVTITCRASQGISNYLAWYQQKPGKAPKLLIYAASTLQSGAPSRFSGSGSGTEFTLTISSLQPEDFATYYCQQLNSYPSITFGQGTRLEIK

SEQ ID NO: 12776 - protein, 10 aa, Artificial Sequence
  Synthetic
QQLNSYPSIT

SEQ ID NO: 12777 - protein, 125 aa, Artificial Sequence
  Synthetic
QLQLQESGPGLVKPSETLSLTCTVSRASISSSNYYWGWIRQPPGKGLEWIGNIFYSGITYYNPSLKSRVTISVDTSNNQFSLRLTSVTAADTAVYYCARFGRYCSSTSCYNFDYWGLGTLVTVSS

SEQ ID NO: 12778 - protein, 17 aa, Artificial Sequence
  Synthetic
ARFGRYCSSTSCYNFDY

SEQ ID NO: 12779 - protein, 108 aa, Artificial Sequence
  Synthetic
QSVLTQPPSASGSPGQSVTISCTGTSSDIGSYDYVSWFQHHPGKAPKLMIYEVNKRPSGVPDRFSGSKSGNTASLTVSGLQAEDEAEYFCSSYAGVILFGTGTKVSVL

SEQ ID NO: 12780 - protein, 8 aa, Artificial Sequence
  Synthetic
SSYAGVIL

SEQ ID NO: 12781 - protein, 121 aa, Artificial Sequence
  Synthetic
QVQLVQSGAEVKKPGAAVKVSCKASGYTFTNYHIHWVRQAPGQGLEWMGIFTPSGGRTRYAQKFQGRVTMTRDTSTSTVYMELSSLRSEDTAVYYCAREAIIGSTGYFDYWGQGTLVTVSS

SEQ ID NO: 12782 - protein, 14 aa, Artificial Sequence
  Synthetic
AREAIIGSTGYFDY

SEQ ID NO: 12783 - protein, 109 aa, Artificial Sequence
  Synthetic
SYVLTQPPSVSVAPGKTARITCGANNIGSKSVHWYQQKPGQAPVLVVYDDSDRPSGIPERFSGSNSGNTATLTITRVEAGDEADYFCQVWDGSSDHFYLFGTGTKVTVL

SEQ ID NO: 12784 - protein, 12 aa, Artificial Sequence
  Synthetic
QVWDGSSDHFYL

SEQ ID NO: 12785 - protein, 122 aa, Artificial Sequence
  Synthetic
QVQLQESGPGLVKPSGTLSLTCAVSGGSISSSNWWSWVRQPPGKGLEWIGEIHHSGSTNDNPSLKSRVSISVDKSKNQFSLKLSSVTAADTAVYYCAKRLLTDLSYYYLDVWGRGTTVTVSS

SEQ ID NO: 12786 - protein, 15 aa, Artificial Sequence
  Synthetic
AKRLLTDLSYYYLDV

SEQ ID NO: 12787 - protein, 110 aa, Artificial Sequence
  Synthetic
QSVLTQPPSVSDAPRQRVTISCSGSSSNIGNNAVNWYQQLPGKPPKLLIYYDDLLPSGVSDRFSGSKSGTSASLAISGFQSEDEADYYCAAWDDSLNAYVFGTGTKVTVL

SEQ ID NO: 12788 - protein, 11 aa, Artificial Sequence
  Synthetic
AAWDDSLNAYV

SEQ ID NO: 12789 - protein, 126 aa, Artificial Sequence
  Synthetic
EVQLVQSGAEVKKSGESLRISCKGSGYSFTSYWIGWVRQMPGKGLEWMGIVYPSDSDTRYSPSFQGQVTISADKSISTAYLQWSSLKASDTAMYYCVSQDNSPGVTYYYYYYMDVWGKGTTVTVSS

SEQ ID NO: 12790 - protein, 19 aa, Artificial Sequence
  Synthetic
VSQDNSPGVTYYYYYYMDV

SEQ ID NO: 12791 - protein, 108 aa, Artificial Sequence
  Synthetic
DIQMTQSPSSLSASVGDRVTITCRASQSINSYLHWYQQKPGKAPKLLIYAASSLQSGVPSRFSGSGSETEFTLTISSLQPEDFATYYCQQSYSTHLWTFGQGTKVEVK

SEQ ID NO: 12792 - protein, 10 aa, Artificial Sequence
  Synthetic
QQSYSTHLWT

SEQ ID NO: 12793 - protein, 1273 aa, Artificial Sequence
  Synthetic
MFVFLVLLPLVSSQCVNLTTRTQLPPAYTNSFTRGVYYPDKVFRSSVLHSTQDLFLPFFSNVTWFHAIHVSGTNGTKRFDNPVLPFNDGVYFASTEKSNIIRGWIFGTTLDSKTQSLLIVNNATNVVIKVCEFQFCNDPFLGVYYHKNNKSWMESEFRVYSSANNCTFEYVSQPFLMDLEGKQGNFKNLREFVFKNIDGYFKIYSKHTPINLVRDLPQGFSALEPLVDLPIGINITRFQTLLALHRSYLTPGDSSSGWTAGAAAYYVGYLQPRTFLLKYNENGTITDAVDCALDPLSETKCTLKSFTVEKGIYQTSNFRVQPTESIVRFPNITNLCPFGEVFNATRFASVYAWNRKRISNCVADYSVLYNSASFSTFKCYGVSPTKLNDLCFTNVYADSFVIRGDEVRQIAPGQTGKIADYNYKLPDDFTGCVIAWNSNNLDSKVGGNYNYLYRLFRKSNLKPFERDISTEIYQAGSTPCNGVEGFNCYFPLQSYGFQPTNGVGYQPYRVVVLSFELLHAPATVCGPKKSTNLVKNKCVNFNFNGLTGTGVLTESNKKFLPFQQFGRDIADTTDAVRDPQTLEILDITPCSFGGVSVITPGTNTSNQVAVLYQDVNCTEVPVAIHADQLTPTWRVYSTGSNVFQTRAGCLIGAEHVNNSYECDIPIGAGICASYQTQTNSPRRARSVASQSIIAYTMSLGAENSVAYSNNSIAIPTNFTISVTTEILPVSMTKTSVDCTMYICGDSTECSNLLLQYGSFCTQLNRALTGIAVEQDKNTQEVFAQVKQIYKTPPIKDFGGFNFSQILPDPSKPSKRSFIEDLLFNKVTLADAGFIKQYGDCLGDIAARDLICAQKFNGLTVLPPLLTDEMIAQYTSALLAGTITSGWTFGAGAALQIPFAMQMAYRFNGIGVTQNVLYENQKLIANQFNSAIGKIQDSLSSTASALGKLQDVVNQNAQALNTLVKQLSSNFGAISSVLNDILSRLDKVEAEVQIDRLITGRLQSLQTYVTQQLIRAAEIRASANLAATKMSECVLGQSKRVDFCGKGYHLMSFPQSAPHGVVFLHVTYVPAQEKNFTTAPAICHDGKAHFPREGVFVSNGTHWFVTQRNFYEPQIITTDNTFVSGNCDVVIGIVNNTVYDPLQPELDSFKEELDKYFKNHTSPDVDLGDISGINASVVNIQKEIDRLNEVAKNLNESLIDLQELGKYEQYIKWPWYIWLGFIAGLIAIVMVTIMLCCMTSCCSCLKGCCSCGSCCKFDEDDSEPVLKGVKLHYT

1.-6. (canceled)

7. An isolated anti-SARs-COV-2 antibody or antigen-binding fragment thereof, comprising:
three heavy chain complementarity determining regions (HCDRs) (HCDR1, HCDR2, and HCDR3) of a heavy chain variable region having an amino acid sequence of SEQ ID NO: 1, 3, 5, 7, 9, 11, 13, 15, 17, 19, 21, 23, 25, 27, 29, 31, 33, 35, 37, 39, 41, 43, 45, 47, 49, 51, 53, 55, 57, 59, 61, 63, 65, 67, 69, 71, 73, 75, 77, 79, 81, 83, 85, 87, 89, 91, 93, 95, 97, 99, 101, 103, 105, 107, 109, 111, 113, 115, 117, 119, 121, 123, 125, 127, 129, 131, 133, 135, 137, 139, 141, 143, 145, 147, 149, 151, 153, 155, 157, 159, 161, 163, 165, 167, 169, 171, 173, 175, 177, 179, 181, 183, 185, 187, 189, 191, 193, 195, 197, 199, 201, 203, 205, 207, 209, 211, 213, 215, 217, 219, 221, 223, 225, 227, 229, 231, 233, 235, 237, 239, 241, 243, 245, 247, 249, 251, 253, 255, 257, 259, 261, 263, 265, 267, 269, 271, 273, 275, 277, 279, 281, 283, 285, 287, 289, 291, 293, 295, 297, 299, 301, 303, 305, 307, 309, 311, 313, 315, 317, 319, 321, 323, 325, 327, 329, 331, 333, 335, 337, 339, 341, 343, 345, 347, 349, 351, 353, 355, 357, 359, 361, 363, 365, 367, 369, 371, 373, 375, 377, 379, 381, 383, 385, 387, 389, 391, 393, 395, 397, 399, 401, 403, 405, 407, 409, 411, 413, 415, 417, 419, 421, 423, 425, 427, 429, 431, 433, 435, 437, 439, 441, 443, 445, 447, 449, 451, or 453; and
three light chain CDRs (LCDR1, LCDR2, and LCDR3) of a light chain variable region having the amino acid sequence of SEQ ID NO: 2, 4, 6, 8, 10, 12, 14, 16, 18, 20, 22, 24, 26, 28, 30, 32, 34, 36, 38, 40, 42, 44, 46, 48, 50, 52, 54, 56, 58, 60, 62, 64, 66, 68, 70, 72, 74, 76, 78, 80, 82, 84, 86, 88, 90, 92, 94, 96, 98, 100, 102, 104, 106, 108, 110, 112, 114, 116, 118, 120, 122, 124, 126, 128, 130, 132, 134, 136, 138, 140, 142, 144, 146, 148, 150, 152, 154, 156, 158, 160, 162, 164, 166, 168, 170, 172, 174, 176, 178, 180, 182, 184, 186, 188, 190, 192, 194, 196, 198, 200, 202, 204, 206, 208, 210, 212, 214, 216, 218, 220, 222, 224, 226, 228, 230, 232, 234, 236, 238, 240, 242, 244, 246, 248, 250, 252, 254, 256, 258, 260, 262, 264, 266, 268, 270, 272, 274, 276, 278, 280, 282, 284, 286, 288, 290, 292, 294, 296, 298, 300, 302, 304, 306, 308, 310, 312, 314, 316, 318, 320, 322, 324, 326, 328, 330, 332, 334, 336, 338, 340, 342, 344, 346, 348, 350, 352, 354, 356, 358, 360, 362, 364, 366, 368, 370, 372, 374, 376, 378, 380, 382, 384, 386, 388, 390, 392, 394, 396, 398, 400, 402, 404, 406, 408, 410, 412, 414, 416, 418, 420, 422, 424, 426, 428, 430, 432, 434, 436, 438, 440, 442, 444, 446, 448, 450, 452, or 454.

8. The antibody or antigen-binding fragment thereof of claim 7, comprising:
a heavy chain variable region having an amino acid sequence with at least 75% identity to SEQ ID NO: 1, 3, 5, 7, 9, 11, 13, 15, 17, 19, 21, 23, 25, 27, 29, 31, 33, 35, 37, 39, 41, 43, 45, 47, 49, 51, 53, 55, 57, 59, 61, 63, 65, 67, 69, 71, 73, 75, 77, 79, 81, 83, 85, 87, 89, 91, 93, 95, 97, 99, 101, 103, 105, 107, 109, 111, 113, 115, 117, 119, 121, 123, 125, 127, 129, 131, 133, 135, 137, 139, 141, 143, 145, 147, 149, 151, 153, 155, 157, 159, 161, 163, 165, 167, 169, 171, 173, 175, 177, 179, 181, 183, 185, 187, 189, 191, 193, 195, 197, 199, 201, 203, 205, 207, 209, 211, 213, 215, 217, 219, 221, 223, 225, 227, 229, 231, 233, 235, 237, 239, 241, 243, 245, 247, 249, 251, 253, 255, 257, 259, 261, 263, 265, 267, 269, 271, 273, 275, 277, 279, 281, 283, 285, 287, 289, 291, 293, 295, 297, 299, 301, 303, 305, 307, 309, 311, 313, 315, 317, 319, 321, 323, 325, 327, 329, 331, 333, 335, 337, 339, 341, 343, 345, 347, 349, 351, 353, 355, 357, 359, 361, 363, 365, 367, 369, 371, 373, 375, 377, 379, 381, 383, 385, 387, 389, 391, 393, 395, 397, 399, 401, 403, 405, 407, 409, 411, 413, 415, 417, 419, 421, 423, 425, 427, 429, 431, 433, 435, 437, 439, 441, 443, 445, 447, 449, 451, or 453; and
a light chain variable region having an amino acid sequence with at least 75% identity to SEQ ID NO: 2, 4, 6, 8, 10, 12, 14, 16, 18, 20, 22, 24, 26, 28, 30, 32, 34, 36, 38, 40, 42, 44, 46, 48, 50, 52, 54, 56, 58, 60, 62, 64, 66, 68, 70, 72, 74, 76, 78, 80, 82, 84, 86, 88, 90, 92, 94, 96, 98, 100, 102, 104, 106, 108, 110, 112, 114, 116, 118, 120, 122, 124, 126, 128, 130, 132, 134, 136, 138, 140, 142, 144, 146, 148, 150, 152, 154, 156, 158, 160, 162, 164, 166, 168, 170, 172, 174, 176, 178, 180, 182, 184, 186, 188, 190, 192, 194, 196, 198, 200, 202, 204, 206, 208, 210, 212, 214, 216, 218, 220, 222, 224, 226, 228, 230, 232, 234, 236, 238, 240, 242, 244, 246, 248, 250, 252, 254, 256, 258, 260, 262, 264, 266, 268, 270, 272, 274, 276, 278, 280, 282, 284, 286, 288, 290, 292, 294, 296, 298, 300, 302, 304, 306, 308, 310, 312, 314, 316, 318, 320, 322, 324, 326, 328, 330, 332, 334, 336, 338, 340, 342, 344, 346, 348, 350, 352, 354, 356, 358, 360, 362, 364, 366, 368, 370, 372, 374, 376, 378, 380, 382, 384, 386, 388, 390, 392, 394, 396, 398, 400, 402, 404, 406, 408, 410, 412, 414, 416, 418, 420, 422, 424, 426, 428, 430, 432, 434, 436, 438, 440, 442, 444, 446, 448, 450, 452, or 454.

9. The antibody or antigen-binding fragment thereof of claim 7, comprising:
a heavy chain variable region having the amino acid sequence of SEQ ID NO: 1, 3, 5, 7, 9, 11, 13, 15, 17, 19, 21, 23, 25, 27, 29, 31, 33, 35, 37, 39, 41, 43, 45, 47, 49, 51, 53, 55, 57, 59, 61, 63, 65, 67, 69, 71, 73, 75, 77, 79, 81, 83, 85, 87, 89, 91, 93, 95, 97, 99, 101, 103, 105, 107, 109, 111, 113, 115, 117, 119, 121, 123, 125, 127, 129, 131, 133, 135, 137, 139, 141, 143, 145, 147, 149, 151, 153, 155, 157, 159, 161, 163, 165, 167, 169, 171, 173, 175, 177, 179, 181, 183, 185, 187, 189, 191, 193, 195, 197, 199, 201, 203, 205, 207, 209, 211, 213, 215, 217, 219, 221, 223, 225, 227, 229, 231, 233, 235, 237, 239, 241, 243, 245, 247, 249, 251, 253, 255, 257, 259, 261, 263, 265, 267, 269, 271, 273, 275, 277, 279, 281, 283, 285, 287, 289, 291, 293, 295, 297, 299, 301, 303, 305, 307, 309, 311, 313, 315, 317, 319, 321, 323, 325, 327, 329, 331, 333, 335, 337, 339, 341, 343, 345, 347, 349, 351, 353, 355, 357, 359, 361, 363, 365, 367, 369, 371, 373, 375, 377, 379, 381, 383, 385, 387, 389, 391, 393, 395, 397, 399, 401, 403, 405, 407, 409, 411, 413, 415, 417, 419, 421, 423, 425, 427, 429, 431, 433, 435, 437, 439, 441, 443, 445, 447, 449, 451, or 453; and
a light chain variable region having the amino acid sequence of SEQ ID NO: 2, 4, 6, 8, 10, 12, 14, 16, 18, 20, 22, 24, 26, 28, 30, 32, 34, 36, 38, 40, 42, 44, 46, 48, 50, 52, 54, 56, 58, 60, 62, 64, 66, 68, 70, 72, 74, 76, 78, 80, 82, 84, 86, 88, 90, 92, 94, 96, 98, 100, 102, 104, 106, 108, 110, 112, 114, 116, 118, 120, 122, 124, 126, 128, 130, 132, 134, 136, 138, 140, 142, 144, 146, 148, 150, 152, 154, 156, 158, 160, 162, 164, 166, 168, 170, 172, 174, 176, 178, 180, 182, 184, 186, 188, 190, 192, 194, 196, 198, 200, 202, 204, 206, 208, 210, 212, 214, 216, 218, 220, 222, 224, 226, 228, 230, 232, 234, 236, 238, 240, 242, 244, 246, 248, 250, 252, 254, 256, 258, 260, 262, 264, 266, 268, 270, 272, 274, 276, 278, 280, 282, 284, 286, 288, 290, 292, 294, 296, 298, 300, 302, 304, 306, 308, 310, 312, 314, 316, 318, 320, 322, 324, 326, 328, 330, 332, 334, 336, 338, 340, 342, 344, 346, 348, 350, 352, 354, 356, 358, 360, 362, 364, 366, 368, 370, 372, 374, 376, 378, 380, 382, 384, 386, 388, 390, 392, 394, 396, 398, 400, 402, 404, 406, 408, 410, 412, 414, 416, 418, 420, 422, 424, 426, 428, 430, 432, 434, 436, 438, 440, 442, 444, 446, 448, 450, 452, or 454.

10. The antibody or antigen-binding fragment thereof of claim 7, comprising a heavy chain variable region and a light chain variable region comprise the respective amino acid sequences of SEQ ID NOs: 1-2, 3-4, 5-6, 7-8, 9-10, 11-12, 13-14, 15-16, 17-18, 19-20, 21-22, 23-24, 25-26, 27-28, 29-30, 31-32, 33-34, 35-36, 37-38, 39-40, 41-42, 43-44, 45-46, 47-48, 49-50, 51-52, 53-54, 55-56, 57-58, 59-60, 61-62, 63-64, 65-66, 67-68, 69-70, 71-72, 73-74, 75-76, 77-78, 79-80, 81-82, 83-84, 85-86, 87-88, 89-90, 91-92, 93-94, 95-96, 97-98, 99-100, 101-102, 103-104, 105-106, 107-108, 109-110, 111-112, 113-114, 115-116, 117-118, 119-120, 121-122, 123-124, 125-126, 127-128, 129-130, 131-132, 133-134, 135-136, 137-138, 139-140, 141-142, 143-144, 145-146, 147-148, 149-150, 151-152, 153-154, 155-156, 157-158, 159-160, 161-162, 163-164, 165-166, 167-168, 169-170, 171-172, 173-174, 175-176, 177-178, 179-180, 181-182, 183-184, 185-186, 187-188, 189-190, 191-192, 193-194, 195-196, 197-198, 199-200, 201-202, 203-204, 205-206, 207-208, 209-210, 211-212, 213-214, 215-216, 217-218, 219-220, 221-222, 223-224, 225-226, 227-228, 229-230, 231-232, 233-234, 235-236, 237-238, 239-240, 241-242, 243-244, 245-246, 247-248, 249-250, 251-252, 253-254, 255-256, 257-258, 259-260, 261-262, 263-264, 265-266, 267-268, 269-270, 271-272, 273-274, 275-276, 277-278, 279-280, 281-282, 283-284, 285-286, 287-288, 289-290, 291-292, 293-294, 295-296, 297-298, 299-300, 301-302, 303-304, 305-306, 307-308, 309-310, 311-312, 313-314, 315-316, 317-318, 319-320, 321-322, 323-324, 325-326, 327-328, 329-330, 331-332, 333-334, 335-336, 337-338, 339-340, 341-342, 343-344, 345-346, 347-348, 349-350, 351-352, 353-354, 355-356, 357-358, 359-360, 361-362, 363-364, 365-366, 367-368, 369-370, 371-372, 373-374, 375-376, 377-378, 379-380, 381-382, 383-384, 385-386, 387-388, 389-390, 391-392, 393-394, 395-396, 397-398, 399-400, 401-402, 403-404, 405-406, 407-408, 409-410, 411-412, 413-414, 415-416, 417-418, 419-420, 421-422, 423-424, 425-426, 427-428, 429-430, 431-432, 433-434, 435-436, 437-438, 439-440, 441-442, 443-444, 445-446, 447-448, 449-450, 451-452, or 453-454.

11. The antibody or antigen-binding fragment thereof of claim 7, wherein the antibody or antigen-binding fragment thereof is a multivalent antibody.

12. The antibody or antigen-binding fragment thereof of claim 11, wherein the multivalent antibody is a bivalent or bispecific antibody.

13. The antibody or the antigen-binding fragment thereof of claim 7, further comprising an Fc region or a variant Fc region.

14. The antibody or antigen-binding fragment thereof of claim 7, wherein the antibody is a monoclonal antibody.

15. The antibody or antigen-binding fragment thereof of claim 7, wherein the antibody is a chimeric antibody, a humanized antibody, or humanized monoclonal antibody.

16. The antibody or antigen-binding fragment thereof of claim 7, wherein the antibody is a single-chain antibody, a Fab fragment, or a Fab2 fragment.

17. The antibody or antigen-binding fragment thereof of claim 7, wherein the antibody or antigen-binding fragment thereof is detectably labeled or conjugated to a toxin, a therapeutic agent, a polymer, a receptor, an enzyme, or a receptor ligand.

18. (canceled)

19. A pharmaceutical composition comprising the antibody or antigen-binding fragment thereof of claim 7 and a pharmaceutically acceptable carrier or excipient.

20. The pharmaceutical composition of claim 7, wherein the pharmaceutical comprises two or more of the antibody or antigen-binding fragment thereof of claim 7.

21.-26. (canceled)

27. A nucleic acid molecule encoding a polypeptide chain of the antibody or antigen-binding fragment thereof of claim 7.

28. A vector comprising the nucleic acid molecule of claim 27.

29. A cultured host cell comprising the vector of claim 28.

30. A method of preparing an antibody, or antigen-binding portion thereof, comprising:
obtaining the cultured host cell of claim 29;
culturing the cultured host cell in a medium under conditions permitting expression of a polypeptide encoded by the vector and assembling of an antibody or fragment thereof; and
purifying the antibody or fragment from the cultured cell or the medium of the cell.

31. A kit comprising a pharmaceutically acceptable dose unit of the antibody or antigen-binding fragment thereof of claim 7.

32. (canceled)

33. A method of neutralizing SARS-COV-2 in a subject, comprising administering to a subject in need thereof a therapeutically effective amount of the antibody or antigen-binding fragment thereof of claim 7.

34. A method of preventing or treating a SARS-COV-2 infection, comprising administering to a subject in need thereof a therapeutically effective amount of the antibody or antigen-binding fragment thereof of claim 7.

35.-57. (canceled)
